(19) United States
(12) Patent Application Publication
(10) Pub. No.: US 2022/0105170 A1
(43) Pub. Date: Apr. 7, 2022

(54) AFRICAN SWINE FEVER VACCINE

(71) Applicants: Phibro Animal Health Corporation, Teaneck, NJ (US); Life Science Research Israel Ltd., Ness-Ziona (IL)

(72) Inventors: Avner Finger, Pardes Hanna-Karkur (IL); Avi Zrachya, Airport City (IL); Ofer Cohen, Ness-Ziona (IL); Anat Zvi, Ness-Ziona (IL)

(73) Assignees: Phibro Animal Health Corporation, Teaneck, NJ (US); Life Science Research Israel Ltd., Ness-Ziona (IL)

(21) Appl. No.: 17/554,232

(22) Filed: Dec. 17, 2021

Related U.S. Application Data
(63) Continuation of application No. PCT/US2020/039846, filed on Jun. 26, 2020.
(60) Provisional application No. 62/941,381, filed on Nov. 27, 2019.
(60) Provisional application No. 62/868,483, filed on Jun. 28, 2019.

(51) Int. Cl. A61K 39/12; A61K 39/39; A61P 31/20; C12N 7/00

(52) U.S. Cl. CPC A61K 39/12; A61K 39/39; A61K 2039/55588; C12N 7/00; A61P 31/20

(57) ABSTRACT

Peptides predicted to be immunogenic against African swine fever virus (ASFV) and vaccine compositions that include the peptides are disclosed herein. In some embodiments, these compositions comprise or consist of one or more peptides comprising the amino acid sequence set forth in SEQ ID NOs: 2-2273. In other embodiments, the compositions comprise viral vectors or host cells, or combinations thereof, that comprise one or more of the peptides. In other embodiments, the compositions comprise nucleic acid molecules comprising one or more of the peptides. The compositions disclosed can include one or more additional components, such as, but not limited to, a carrier, an adjuvant, an additional therapeutic, or combinations thereof. Containers and kits that comprise the compositions are described. Uses of the compositions can include administration to an animal to induce an immune response in the animal, or to immunize the animal against ASFV. Administration can be accomplished using one or more of various methods as described herein, such as intramuscular or intranasal administration.

### CROSS REFERENCE TO RELATED APPLICATIONS

[0001] This application is a continuation of International Application No. PCT/US2020/039846, filed on Jun. 26, 2020, which was published in English under PCT Article 21(2), which in turn claims the benefit under 35 U.S.C. § 119(e) of the earlier filing dates of U.S. Provisional Applications, Nos. 62/868,483, filed on Jun. 28, 2019, and 62/941,381, filed on Nov. 27, 2019. The prior applications are incorporated herein by reference in their entireties.

### FIELD

[0002] This disclosure concerns embodiments of a composition comprising a peptide or mixture of peptides associated with the African swine fever virus (ASFV), or comprising one or more vectors comprising one or more such peptides, and embodiments of a method for administering such a composition or compositions to elicit an immune response against ASFV, and/or to mitigate or inhibit symptoms associated with viral infections.

### PARTIES TO JOINT RESEARCH AGREEMENT

[0003] Phibro Animal Health Holdings, Inc. and Life Science Research Israel Ltd. executed a Joint Research Agreement on or before the date subject matter disclosed and claimed by the present application was made, and such subject matter was made as a result of activities undertaken within the scope of the Joint Research Agreement.

### BACKGROUND

[0004] African swine fever (ASF), caused by African swine fever virus (ASFV), is one of the most serious viral diseases affecting domestic pigs, in part due to high infectivity and mortality rates. ASFV infection usually results in acute hemorrhagic disease with a mortality rate approaching 100% in domestic swine. The virus can be transmitted by ingestion, contact, or through ticks of the genus Ornithodoros.

[0005] ASFV was first identified in Kenya in the 1920s, and is endemic in Africa, where wild pig species act as reservoirs for the virus. In the 1950s, ASFV spread throughout Europe, including Spain, Portugal, Italy, and France, but was eradicated from these countries, except for the island of Sardinia, Italy, by the mid-1990s. However, the disease was introduced into Georgia in 2007, and then spread throughout Eastern Europe and Russia. The virus continued to spread worldwide and has now been reported in 37 countries or regions. In 2018, at least four countries, including Hungary, Bulgaria, Belgium, and China, reported their first ever ASFV outbreaks to the World Organization for Animal Health (OIE; http://www.oie.int/).

[0006] The first ASF case in China was reported on Aug. 3, 2018. By Jan. 19, 2019, at least 100 ASF cases had occurred in 23 provinces or regions across the country (http://www.oie.int/). ASF continues to spread throughout China, severely threatening the country's domestic swine population, which accounts for more than 50% of the swine population globally. ASFV is the only member of the Asfarviridae family and has a linear, double-stranded DNA genome. ASF is currently diagnosed in China by detecting viral genes using real-time PCR and partial genome sequence analysis. There is currently no effective vaccine to prevent ASF and the disease therefore poses a major threat to both the swine industry and global food security. SUMMARY

[0007] Certain embodiments of the present disclosure concern an immunogenic peptide or peptides associated with ASFV, and compositions comprising one or more such peptides selected from SEQ ID NOs. 2-2273. In particular embodiments, the peptides are expressed by the ASFV strain, China/2018/AnhuiXCGQ. A composition may comprise a nucleic acid molecule, host cell, and/or vector, such as a viral or bacterial vector, encoding one or more peptides selected from SEQ ID NOs. 2-2273.

[0008] Some embodiments of the present disclosure concern one or more immunogenic peptides of SEQ ID NOs. 2-2273, one or more constructs (for example, one or more amino acid sequences of SEQ ID NOs. 2310-2330), one or more domains (also referred to herein as “hotspots” as described in Example 3; for example, one or more amino acid sequences of SEQ ID NOs: 2331-2335), and/or one or more full- and/or partial-length ASFV proteins (for example, one or more proteins of SEQ ID NOs: 2323-2329 and/or nucleic acids of SEQ ID NOs. 2339-2345). A composition may comprise one or more vectors and/or cells and/or nucleic acid molecules comprising or encoding one or more of the peptides, constructs, domains, and/or full- and/or partial-length ASFV proteins.

[0009] Embodiments of a method for using disclosed peptides, constructs, compositions, isolated nucleic acids, vectors, and/or host cells are also provided. For example, one or more peptides, compositions, isolated nucleic acids, vectors, and/or host cells, may be administered, such as by oral, intramuscular, topical, and/or mucosal administration, to an animal, such as an ungulate, and even more particularly a swine, to stimulate an immune response, induce immunity in the animal, and/or reduce or ameliorate at least one symptom associated with a viral infection, such as viral infection associated with ASF. Such method can be used to treat or prophylactically vaccinate adult and/or juvenile animals. In some embodiments, a composition may include a pharmaceutically acceptable carrier, an adjuvant, an additional therapeutic, or a combination thereof. Additional therapeutics may include compounds or compositions that reduce or alleviate the symptoms of ASF, or other compositions, such as vaccines against other infections common in swine, particularly infections or conditions that may be exacerbated by ASF.

[0010] Certain embodiments comprise one or more peptides of SEQ ID NOs. 2-2273 wherein one or more amino acids of a peptide is substituted with another one or more amino acids, or wherein an amino acid in the peptide is inserted or deleted, or combinations thereof, provided that the resultant peptide or peptides are capable of inducing an immune response and/or ameliorating one or more symptoms associated with ASFV. A peptide may be produced by any suitable technique, including chemical synthesis and/or intracellular synthesis using recombinant techniques. Some embodiments comprise one or more peptides from 5 to at least 50 amino acids in length, such as, for example, 6-40, 8-30, 10-20, or 8-11 amino acids in length. A disclosed immunogenic peptide or peptides may be modified, for example, for the purpose of stabilizing peptide conformation, improving peptide stability against enzymatic degradation, improving peptide stability in vivo, or combinations thereof. Such modifications can include, for example, glycosylation, PEGylation, lipidation, cyclisation, acetylation, amidation, conjugation, D-amino acid incorporation, a similar modification, or combinations thereof.

[0011] Some disclosed embodiments concern one or more isolated nucleic acid molecules that encode the amino acid sequence of one or more peptides of SEQ ID NOs 2-2273, or that result from the substitution of some or any of the nucleotides of one or more of the nucleic acid molecules with other nucleotides, or from the insertion or deletion of one or more of such nucleotides, provided that the resultant peptides are capable of inducing an immune response and/or ameliorating one or more symptoms associated with ASF. Some embodiments concern a composition comprising one or more nucleic acid molecules that encode at least one peptide of SEQ ID NOs. 2-2273. A nucleic acid molecule encoding one or more peptides of SEQ ID NOs. 2-2273 may also encode additional components, such as, for example, expression control sequences, selection-related sequences, multiple cloning sites, similar sequences, or combinations thereof.

[0012] The peptides disclosed herein can be, and were, identified using various bioinformatics approaches, such as, for example, predictive algorithms that can identify high density clusters of putative immunogenic peptides and/or can identify potentially immunogenic peptides based on predicted WIC binding affinity. Immunogenicity of the disclosed peptides can be validated using various methods for measuring an immune response in vitro or in vivo, including, for example, ELISA and/or ELISpot assays, and/or observing symptom development in a challenged swine following vaccination. Such methods are known to those of ordinary skill in the art, and the present invention is not limited to using specific assays.

[0013] Multiple types and versions of vectors, nucleic acid molecules, and host cells encoding and/or expressing one or more peptides of SEQ ID NOs. 2-2273, one or more constructs (for example, one or more amino acid sequences of SEQ ID NOs. 2310-2330), one or more domains (also referred to herein as “hotspots” as described in Example 3; for example, one or more amino acid sequences of SEQ ID NOs: 2331-2335), and/or one or more full- and/or partial-length ASFV proteins (for example, one or more proteins of SEQ ID NOs: 2323-2329 and/or nucleic acids of SEQ ID NOs. 2339-2345). In some embodiments, one or more nucleic acid molecules encoding the one or more peptides, constructs, domains, and/or full- or partial-length ASFV proteins are incorporated into a viral vector, a host cell, and/or a larger nucleic acid construct, such as a plasmid, for administration to an animal. Methods of producing the vectors, nucleic acid molecules, and host cells are known to those of ordinary skill in the art, and the disclosure is not limited to using specific vector, nucleic acid molecule, or host cell production methods, or to specific vectors, nucleic acid molecules, or cell types.

[0014] Compositions comprising one or more vectors, and/or host cells, and/or nucleic acid molecules comprising one or more disclosed peptides, constructs, domains, and/or full- or partial-length ASFV proteins, for administration to an animal, such as mammals, including ungulates, and in particular embodiments to swine, also are disclosed. In some embodiments, one or more of the compositions may be used to elicit an immune response against ASFV and/or to immunize a subject against ASFV. A composition can be in a liquid solution or suspension, such as in PBS, water, an organic solvent or suspension aid, or another acceptable carrier. A composition can be in a dried, tablet, or powdered form, such as lyophilized or freeze dried, for direct administration to an animal, or alternatively can be reconstituted, for example with PBS, water, an organic solvent, or another acceptable carrier. A composition can also be in a gel or syrup form.

[0015] Disclosed immunogenic compositions may include other agents. Some embodiments concern a pharmaceutical composition comprising a therapeutically effective amount of a DNA construct encoding one or more disclosed peptides, constructs, domains, and/or full- or partial-length ASFV proteins, or of a vector encoding one or more of the peptides, constructs, domains, and/or full- or partial-length ASFV proteins, or of a cell comprising one or more of the peptides, together with one or more additional components. Additional components may include, but are not limited to, one or more adjuvants, carriers, and/or other therapeutics, such as, for example, other vaccines and/or compounds or compositions that reduce or alleviate the symptoms of ASF or conditions or infections that are exacerbated by ASF.

[0016] A composition may include two or more peptides of SEQ ID NOs. 2-2273 that are combined by polymerization to form an immunogenic polymer using one or more chemical methods, recombinant techniques, and/or enzymatic reactions. The peptides in the immunogenic polymer according to SEQ ID NOs. 2-2273 may be directly adjacent, or maybe separated by other sequences. A composition may include two or more disclosed peptides, constructs, domains, and/or full- or partial-length ASFV proteins that are combined by polymerization to form an immunogenic polymer using one or more chemical methods, recombinant techniques, and/or enzymatic reactions. The peptides, constructs, domains, and/or full- or partial-length ASFV proteins in the immunogenic polymer may be directly adjacent, or maybe separated by other sequences.

[0017] Also provided are cinnamon-derived compositions comprising a cinnamon extract, one or more fractions of a cinnamon extract, and/or one or more precipitates of a cinnamon extract. Certain embodiments concern an aqueous extract of cinnamon bark (Cinnamomum sp.), but other polar solvents may also be used. Useful extraction compositions may be made by any suitable process. Certain embodiments concern formation of an aqueous solution, which may then be centrifuged and a supernatant collected that includes an antiviral active fraction. A precipitate from the solution may also be formed, such as by evaporation or by adding a precipitation aid, such as, for example, a salt, such as a chloride salt.

[0018] Certain embodiments concern a pharmaceutical composition or a nutraceutical composition for the treatment of an infection comprising an effective amount of a cinnamon extract, one or more fractions of a cinnamon extract, and/or one or more precipitates of a cinnamon extract, together with a carrier suitable for pharmaceutical or nutraceutical compositions. Such compositions can also include one or more of the peptides, vectors, host cells, and/or nucleic acid molecules comprising one or more immunogenic peptides, constructs, domains, and/or full- or partial-length ASFV proteins disclosed herein. Such compositions can also include other components, such as at least one additional therapeutic or nutraceutic component. The compounds and/or compositions so formed have antiviral activity and can be administered by any suitable method as will be understood by a person of ordinary skill in the art, such as orally, nasally, parenterally, subcutaneously, and/or intramuscularly.

[0019] Also provided are embodiments of a method of treating a subject, such as an animal, particularly swine, that may have or be at risk of having ASF, with one or more disclosed peptides, constructs, domains, and/or full- or partial-length ASFV proteins, and/or one or more nucleic acids, vectors, host cells, or compositions comprising the one or more peptides, constructs, domains, and/or full- or partial-length ASFV proteins, or combinations thereof, as disclosed herein. An animal may be administered such compositions by one or more methods known to a person of ordinary skill in the art. Exemplary administration methods include, but are not limited to, topical, oral, subcutaneous, transdermal, intrathecal, intramuscular, intravenous, intraperitoneal, and similar administration routes, or combinations thereof. In certain embodiments, compositions may be administered as a single dose or as multiple doses (for example, boosters). Different administrations can include one or more different compositions, combinations of compositions, or amounts thereof. For example, the second administration can be with the same, or with a different composition than, the first composition administered.

[0020] The dose administered to a subject should be sufficient to induce a beneficial therapeutic response in a subject over time, or to inhibit ASFV infection. The beneficial therapeutic response may require one or more doses, such as 1, 2, 3, 4, 5, 6, 7, 8, 9, or 10 doses, and more typically 2-4 doses, administered at the same or different times. In some embodiments, one or more compositions comprising the peptide(s), vectors, nucleic acid molecules, or host cells described herein, or combinations thereof, can be administered to an animal to produce an immune response against ASFV, and/or to immunize an animal against ASFV. The dose may vary from subject to subject or may be the same. An appropriate dose can be determined by one of ordinary skill in the art using routine experimentation.

[0021] Also provided are embodiments of a method for administering one or more disclosed peptides, constructs, domains, and/or full- or partial-length ASFV proteins, or one or more nucleic acids, vectors, host cells, or compositions comprising the one or more peptides, constructs, domains, and/or full- or partial-length ASFV proteins, or combinations thereof, to an animal to elicit or stimulate an immune response in the animal. In one embodiment, the method includes vaccinating or immunizing an animal against ASFV using a composition comprising a viral vector expressing one or more disclosed peptides, constructs, domains, and/or full- or partial-length ASFV proteins. In other embodiments, an animal is administered one or more compositions comprising a viral vector expressing one or more disclosed peptides, constructs, domains, and/or full- or partial-length ASFV proteins, and is subsequently administered a vaccine comprising a live attenuated ASFV. Methods of determining whether an immune response has been elicited or stimulated are known to those of ordinary skilled in the art. In some embodiments, an immune response is achieved if there is an observed reduction in illness (such as reduction or amelioration of symptoms), reduction in viral titers, reduction in mortality rate, or a combination thereof.

[0022] Certain disclosed embodiments concern a neutralized virus composition, particularly a neutralized AFSV virus, wherein the virus is neutralized by contact with a cinnamon extract. The neutralized virus composition can be used to vaccinate a subject. For example, the method may comprise providing a cinnamon-extract-neutralized AFSV virus composition, and vaccinating a subject with the composition. The subject may be a mammal, such as an ungulate, and even more particularly may be swine.

[0023] Also provided are containers that comprise one or more of the disclosed peptides, constructs, domains, and/or full- or partial-length ASFV proteins, or one or more nucleic acids, vectors, host cells, or compositions comprising or encoding the one or more peptides, constructs, domains, and/or full- or partial-length ASFV proteins, or combinations thereof. A container may be reusable or disposable. Also provided are kits that include one or more such containers. The one or more containers in the kit can include one or more additional components. In some examples, the kits also include a device or devices that permit administration of one or more of the compositions, or of one or more of the additional components, or combinations thereof, to an animal. The foregoing and other objects, features, and advantages of the invention will become

[0024] more apparent from the following detailed description, which proceeds with reference to the accompanying figures.

### BRIEF DESCRIPTION OF THE DRAWINGS

[0025] FIG. 1 The complete genome of the ASFV China/2018/AnhuiXCGQ strain (GenBank Accession No. MK128995.1) was screened for CD8+epitopes in relation to the known SLA class I alleles of the Yorkshire, Landrace, and Duroc swine breed lines. Candidate peptides were evaluated according to four criteria: (1) predicted binding affinity of the peptide to SLA class I molecules; (2) position in highly dense clusters of putative epitopes as a method to enrich positive responders; (3) coverage of SLA alleles and prioritization of highly prevalent alleles; and (4) the nature of the source protein (giving precedence to immunogens). Out of 212,394 putative peptides, 2,272 were selected for further evaluation. ELISpot assays were used to further screen the 2,272 peptides.

[0026] FIG. 2 Provides Elispot results—Positive Pool Separation—concerns pools of peptides (approximately 8-9 peptides per pool) that were screened using ELISpot assays conducted using lymphocytes from 8 swine, denoted 2S, 3S, 5S, 7S, 10S, 14S, 6H, 7H. Thirty-three pools out of a total of 238 “positive” pools (those pools for which the number of spots met or exceeded a threshold) were selected. The 33 positive pools contained 267 peptides, to which 9 individual peptides identified as positive in the full screen were added (for a total of 276 peptides), for further testing.

[0027] FIG. 3 Provides Elispot results—Positive Pool Separation—concerning 276 peptides identified in the pool screen (FIG. 2) that were assessed individually using ELISpot assays. Concanavalin A (ConA) was used as a positive control, and a negative control (medium only) was used to calculate permissive and strict thresholds (wherein “average of medium” denotes the average number of spots in wells with medium only, calculated for each swine plate separately, and “STDEV_P” denotes standard deviation based on the entire population). Of the 276 peptides tested, 201 met or exceeded the permissive threshold calculated for these ELISpot assays (Appendix IV), and of the 201 peptides, 125 met or exceeded the stringent threshold (Appendix VIII). Of the 125 peptides that met or exceeded the stringent threshold, 77 were identified for

[0028] which at least 20 spots were counted (Appendix V). FIG. 4 The 77 peptides described in FIG. 3 were mapped to their locations within ASFV proteins (Appendices V-VI). Forty-four of the 77 peptides clustered within seven ASFV proteins (Appendix VII). The peptides of SEQ ID NOs: 619, 621, 633, 636, 639, 640, 645, 651, 652, 653, and 662 mapped to ASFV protein A238L, an IκB-like protein (GenBank Accession No. AYW34011.1).

[0029] FIG. 5 The peptides of SEQ ID NOs: 496, 497, 527, 529, 541, and 544 mapped to ASFV protein A224L (IAP-like protein p27; GenBank Accession No. AYW34004.1) (Appendix VII).

[0030] FIG. 6 The peptides of SEQ ID NOs: 377, 400, 404, 435, 447, 449, 455, 456, 457, 461, 462, 463, and 467 mapped to ASFV protein MGF_505-7R (GenBank Accession No. AYW34001.1) (Appendix VII).

[0031] FIG. 7 The peptides of SEQ ID NOs: 553, 554, 561, 578, 584, and 589 mapped to ASFV protein MGF_360-15R (GenBank Accession No. AYW34010.1) (Appendix VII).

[0032] FIG. 8 The peptides of SEQ ID NOs: 1248, 1253, and 1280 mapped to ASFV zinc finger protein B385R (GenBank Accession No. AYW34052.1) (Appendix VII).

[0033] FIG. 9 The peptides of SEQ ID NOs: 468, 469, and 478 mapped to ASFV protein MGF_505-9R (GenBank Accession No. AYW34002.1) (Appendix VII).

[0034] FIG. 10 The peptides of SEQ ID NOs: 67 and 69 mapped to ASFV protein MGF_110-3L (GenBank Accession No. AYW33963.1) (Appendix VII).

[0035] FIGS. 11-34 show Coomassie blue-stained gel and western blotting results for each of 54 constructs expressed in E. coli at either 22° C. (FIG. 11-21) or 37° C. (FIGS. 22-34), along with the expected molecular weight and specific one or more tags for each construct. Sequences of constructs labeled 1-54 are provided in SEQ ID NOs. 2310-2330. While each construct included a His-tag for detection purposes, certain constructs also included at least one additional fusion protein, such as HLT, Sumo, or MBP. In FIGS. 11, 14, 17, 18, 21, 22, 25, 27, 30, and 33, if only “His” is shown in column three of the table, the construct included a His-tag, but no fusion protein (constructs shown as including a fusion protein also included a His-tag). Proteins were collected and then separated using polyacrylamide gel electrophoresis. As depicted in the Coomassie blue-stained gels and western blots, “M” shows the marker lane denoting band molecular weights, “S” represents proteins collected from cell culture supernatants, and “P” represents proteins collected from cell pellets.

[0036] FIG. 11 shows a table that provides the expected molecular weight (in kDa) (column 2) and the tag and/or fusion protein (column 3) associated with each construct of column 1. Expression analysis results for constructs listed in FIG. 11 (constructs 1-14) are shown in the Coomassie blue-stained gel of FIG. 12 and the western blot of FIG. 13.

[0037] FIG. 12 provides an image of a Coomassie blue-stained gel showing proteins collected from the cell pellet (P) or supernatant (S) of E. coli cultures grown at 22° C. E. coli cultures each expressed one of constructs 1-14 (FIG. 11).

[0038] FIG. 13 shows an image of a western blot that corresponds to the Coomassie blue-stained gel of FIG. 12. Relative expression levels of constructs 1-14 (FIG. 11) are shown, as detected using anti-His antibodies.

[0039] FIG. 14 shows a table that provides the expected molecular weight (in kDa) (column 2) and the tag and/or fusion protein (column 3) associated with each construct of column 1. Expression analysis results for constructs listed in FIG. 14 (constructs 15-28) are shown in the Coomassie blue-stained gel of FIG. 15 and the western blot of FIG. 16.

[0040] FIG. 15 provides an image of a Coomassie blue-stained gel showing proteins collected from the cell pellet (P) or supernatant (S) of E. coli cultures grown at 22° C. E. coli cultures each expressed one of constructs 15-28 (FIG. 14).

[0041] FIG. 16 shows an image of a western blot that corresponds to the Coomassie blue-stained gel of FIG. 15. Relative expression levels of constructs 15-28 (FIG. 14) are shown, as detected using anti-His antibodies.

[0042] FIG. 17 shows a table and images of a Coomassie blue-stained gel and a corresponding western blot. The table (bottom) provides the expected molecular weight (in kDa) (column 2) and the tag and/or fusion protein (column 3) associated with each construct of column 1 (constructs 29-32). The Coomassie blue-stained gel (left) shows proteins collected from the cell pellet (P) or supernatant (S) of E. coli cultures grown at 22° C. The western blot (right) shows relative expression levels of constructs 29-32 as detected using anti-His antibodies.

[0043] FIG. 18 shows a table that provides the expected molecular weight (in kDa) (column 2) and the tag and/or fusion protein (column 3) associated with each construct of column 1. Expression analysis results for constructs listed in FIG. 18 (constructs 33-47) are shown in the Coomassie blue-stained gel of FIG. 19 and the western blot of FIG. 20.

[0044] FIG. 19 provides an image of a Coomassie blue-stained gel showing proteins collected from the cell pellet (P) or supernatant (S) of E. coli cultures grown at 22° C. E. coli cultures each expressed one of constructs 33-47 (FIG. 18).

[0045] FIG. 20 shows an image of a western blot that corresponds to the Coomassie blue-stained gel of FIG. 19. Relative expression levels of constructs 33-47 (FIG. 18) are shown, as detected using anti-His antibodies.

[0046] FIG. 21 shows a table and images of a Coomassie blue-stained gel and a corresponding western blot. The table (bottom) provides the expected molecular weight (in kDa) (column 2) and the tag and/or fusion protein (column 3) associated with each construct of column 1 (constructs 48-54). The Coomassie blue-stained gel (left) shows proteins collected from the cell pellet (P) or supernatant (S) of E. coli cultures grown at 22° C. The western blot (right) shows relative expression levels of constructs 48-54 as detected using anti-His antibodies.

[0047] FIG. 22 shows a table that provides the expected molecular weight (in kDa) (column 2) and the tag and/or fusion protein (column 3) associated with each construct of column 1. Expression analysis results for constructs listed in FIG. 22 (constructs 5-14) are shown in the Coomassie blue-stained gel of FIG. 23 and the western blot of FIG. 24.

[0048] FIG. 23 provides an image of a Coomassie blue-stained gel showing proteins collected from the cell pellet (P) or supernatant (S) of E. coli cultures grown at 37° C. E. coli cultures each expressed one of constructs 5-14 (FIG. 22).

[0049] FIG. 24 shows an image of a western blot that corresponds to the Coomassie blue-stained gel of FIG. 23. Relative expression levels of constructs 5-14 (FIG. 22) are shown, as detected using anti-His antibodies.

[0050] FIG. 25 shows a table that provides the expected molecular weight (in kDa) (column 2) and the tag and/or fusion protein (column 3) associated with each construct of column 1. Expression analysis results for constructs listed in FIG. 25 (constructs 15-24) are shown in the western blot of FIG. 26.

[0051] FIG. 26 shows an image of a western blot. Relative expression levels of constructs 15-24 (FIG. 25) are shown, as detected using anti-His antibodies.

[0052] FIG. 27 shows a table that provides the expected molecular weight (in kDa) (column 2) and the tag and/or fusion protein (column 3) associated with each construct of column 1. Expression analysis results for constructs listed in FIG. 27 (constructs 25-37) are shown in the Coomassie blue-stained gel of FIG. 28 and the western blot of FIG. 29.

[0053] FIG. 28 provides an image of a Coomassie blue-stained gel showing proteins collected from the cell pellet (P) or supernatant (S) of E. coli cultures grown at 37° C. E. coli cultures each expressed one of constructs 25-37 (FIG. 27).

[0054] FIG. 29 shows an image of a western blot that corresponds to the Coomassie blue-stained gel of FIG. 28. Relative expression levels of constructs 25-37 (FIG. 27) are shown, as detected using anti-His antibodies.

[0055] FIG. 30 shows a table that provides the expected molecular weight (in kDa) (column 2) and the tag and/or fusion protein (column 3) associated with each construct of column 1. Expression analysis results for constructs listed in FIG. 30 (constructs 1-4, 38-39, and 41-48) are shown in the Coomassie blue-stained gel of FIG. 31 and the western blot of FIG. 32.

[0056] FIG. 31 provides an image of a Coomassie blue-stained gel showing proteins collected from the cell pellet (P) or supernatant (S) of E. coli cultures grown at 37° C. E. coli cultures each expressed one of constructs 1-4, 38-39, and 41-48 (FIG. 30).

[0057] FIG. 32 shows an image of a western blot that corresponds to the Coomassie blue-stained gel of FIG. 31. Relative expression levels of constructs 1-4, 38-39, and 41-4 (FIG. 30) are shown, as detected using anti-His antibodies.

[0058] FIG. 33 shows a table that provides the expected molecular weight (in kDa) (column 2) and the tag and/or fusion protein (column 3) associated with each construct of column 1. Expression analysis results for constructs listed in FIG. 30 (constructs 49-54) are shown in the Coomassie blue-stained gel and the western blot of FIG. 34.

[0059] FIG. 34 shows images of a Coomassie blue-stained gel and a corresponding western blot. The Coomassie blue-stained gel (left) shows proteins collected from the cell pellet (P) or supernatant (S) of E. coli cultures grown at 37° C. E. coli cultures each expressed one of constructs 49-54 (FIG. 33). The western blot (right) shows relative expression levels of constructs 9-54 as detected using anti-His antibodies.

### SEQUENCE LISTING

[0060] The nucleic acid and amino acid sequences listed in the accompanying sequence listing are shown using standard three letter codes for amino acids, and standard letter abbreviations for nucleotide bases, as defined in 37 C.F.R. § 1.822. Only one strand of each nucleic acid sequence is shown, but the complementary strand is understood as included by reference to the displayed strand. The Sequence Listing is submitted as an ASCII text file, created on Dec. 17, 2021, 798, 720 bytes, and is incorporated by reference herein.

[0061] SEQ ID NO. 1 is the genomic nucleic acid sequence of ASFV strain China/2018/AnhuiXCGQ.

[0062] SEQ ID NOs. 2-2273 are amino acid sequences of peptides associated with ASFV, particularly immunogenic peptides that stimulate an immune response to ASFV.

[0063] SEQ ID NOs. 2274-2291 are exemplary DNA sequences that can encode the 18 peptides of Appendix VI. The nucleic acid of SEQ ID NO. 2274 can encode the peptide of SEQ ID NO: 67. The nucleic acid of SEQ ID NO. 2275 can encode the peptide of SEQ ID NO: 69. The nucleic acid of SEQ ID NO. 2276 can encode the peptide of SEQ ID NO: 70. The nucleic acid of SEQ ID NO. 2277 can encode the peptide of SEQ ID NO: 279. The nucleic acid of SEQ ID NO. 2278 can encode the peptide of SEQ ID NO: 435. The nucleic acid of SEQ ID NO. 2279 can encode the peptide of SEQ ID NO: 461. The nucleic acid of SEQ ID NO. 2280 can encode the peptide of SEQ ID NO: 469. The nucleic acid of SEQ ID NO. 2281 can encode the peptide of SEQ ID NO: 478. The nucleic acid of SEQ ID NO. 2282 can encode the peptide of SEQ ID NO: 486. The nucleic acid of SEQ ID NO. 2283 can encode the peptide of SEQ ID NO: 547. The nucleic acid of SEQ ID NO. 2284 can encode the peptide of SEQ ID NO: 548. The nucleic acid of SEQ ID NO. 2285 can encode the peptide of SEQ ID NO: 549. The nucleic acid of SEQ ID NO. 2286 can encode the peptide of SEQ ID NO: 561. The nucleic acid of SEQ ID NO. 2287 can encode the peptide of SEQ ID NO: 589. The nucleic acid of SEQ ID NO. 2288 can encode the peptide of SEQ ID NO: 639. The nucleic acid of SEQ ID NO. 2289 can encode the peptide of SEQ ID NO: 652. The nucleic acid of SEQ ID NO. 2290 can encode the peptide of SEQ ID NO: 653. The nucleic acid of SEQ ID NO. 2291 can encode the peptide of SEQ ID NO: 1253. In each exemplary DNA sequence, the letter ‘R’ represents adenine or guanine; ‘K’ represents guanine or thymine; ‘H’ represents adenine, cytosine, or thymine; ‘D’ represents adenine, guanine, or thymine; ‘Y’ represents cytosine or thymine; ‘S’ represents cytosine or guanine; B represents cytosine, guanine, or thymine; ‘N’ represents adenine, guanine, cytosine, or thymine; ‘M’ represents adenine or cytosine; ‘W’ represents adenine or thymine; and ‘V’ represents adenine, cytosine, or guanine.

[0064] SEQ ID NOs. 2292-2309 are exemplary RNA sequences that can encode the 18 peptides of Appendix VI. The nucleic acid of SEQ ID NO. 2292 can encode the peptide of SEQ ID NO: 67. The nucleic acid of SEQ ID NO. 2293 can encode the peptide of SEQ ID NO: 69. The nucleic acid of SEQ ID NO. 2294 can encode the peptide of SEQ ID NO: 70. The nucleic acid of SEQ ID NO. 2295 can encode the peptide of SEQ ID NO: 279. The nucleic acid of SEQ ID NO. 2296 can encode the peptide of SEQ ID NO: 435. The nucleic acid of SEQ ID NO. 2297 can encode the peptide of SEQ ID NO: 461. The nucleic acid of SEQ ID NO. 2298 can encode the peptide of SEQ ID NO: 469. The nucleic acid of SEQ ID NO. 2299 can encode the peptide of SEQ ID NO: 478. The nucleic acid of SEQ ID NO. 2300 can encode the peptide of SEQ ID NO: 486. The nucleic acid of SEQ ID NO. 2301 can encode the peptide of SEQ ID NO: 547. The nucleic acid of SEQ ID NO. 2302 can encode the peptide of SEQ ID NO: 548. The nucleic acid of SEQ ID NO. 2303 can encode the peptide of SEQ ID NO: 549. The nucleic acid of SEQ ID NO. 2304 can encode the peptide of SEQ ID NO: 561. The nucleic acid of SEQ ID NO. 2305 can encode the peptide of SEQ ID NO: 589. The nucleic acid of SEQ ID NO. 2306 can encode the peptide of SEQ ID NO: 639. The nucleic acid of SEQ ID NO. 2307 can encode the peptide of SEQ ID NO: 652. The nucleic acid of SEQ ID NO. 2308 can encode the peptide of SEQ ID NO: 653. The nucleic acid of SEQ ID NO. 2309 can encode the peptide of SEQ ID NO: 1253. In each exemplary RNA sequence, the letter ‘R’ represents adenine or guanine; ‘K’ represents guanine or uracil; ‘H’ corresponds to adenine, cytosine, or uracil; ‘D’ represents adenine, guanine, or uracil; ‘Y’ represents cytosine or uracil; ‘S’ represents cytosine or guanine; B represents cytosine, guanine, or uracil; ‘N’ represents adenine, guanine, cytosine, or uracil; ‘M’ represents adenine or cytosine; ‘W’ represents adenine or uracil; and ‘V’ represents adenine, cytosine, or guanine.

[0065] SEQ ID NOs. 2310-2330 are constructs that can, for example, be expressed in a host cell using one or more plasmid vectors (such as a pHLT, pSumo, and/or pMBP) or viral vectors (such as a pseudorabies virus vector) or similar. Thus, each construct of SEQ ID NOs. 2310-2330 may further comprise an N-terminal fusion protein, such as HLT, Sumo, or MBP. Exemplary fusion protein sequences that can be attached to one or more construct of SEQ ID NOs. 2310-2330 are provided in SEQ ID NOs. 2336-2338. Further, each construct may comprise a His-tag, such as an N-terminal His-tag connected to either the N-terminus of the construct (if the construct does not include a fusion protein) or of the fusion protein attached to the construct. Constructs can also further comprise a C-terminal linker (GSSG) and HiBiT tag (GSGWRLFKKLS). For each construct, domains (areas of peptide clustering within ASFV proteins, also termed “hotspots” as described in Example 3, and provided individually as SEQ ID NOs. 2331-2335), full- and/or partial-length ASFV proteins (as provided in SEQ ID NOs. 2323-2329), and/or peptides of SEQ ID NOs. 2-2273 are provided in the order in which they appear in the construct sequence.

[0066] SEQ ID NO. 2310 comprises domains 10.1 and 1.1, and corresponds to constructs 1 and 2.

[0067] SEQ ID NO. 2311 comprises domains 3.1 and 11.1, and corresponds to constructs 3 and 4.

[0068] SEQ ID NO. 2312 comprises domains 10.1, 3.1d, 11.1, and 1.1, and corresponds to constructs 5 and 6.

[0069] SEQ ID NO. 1213 comprises domains 10.1, 3.1d, 1.1, and 11.1, and corresponds to constructs 7 and 8.

[0070] SEQ ID NO. 2314 comprises domain 10.1; peptides of SEQ ID NOs. 70, 478, 469, and 486; domain 3.1d; peptides of SEQ ID NOs. 547, 548, 549, 1253, and 279; and domains 1.1, 11.1, and corresponds to constructs 9,10, and 55.

[0071] SEQ ID NO. 2315 comprises peptides of SEQ ID NOs. 639, 548, 653, 589, 67, 69, 561, 461, 279, 547, 435, 478, 652, 486, 1253, 70, 469, and 549, and corresponds to constructs 11-14.

[0072] SEQ ID NO. 2316 comprises peptides of SEQ ID NOs. 639, 548, 653, 589, 67, 69, 561, 461, 279, 547, 435, 478, 652, 486, 1253, 70, 469, and 549, with a spacer (GPGPG) separating each individual peptide sequence, and corresponds to constructs 15-18.

[0073] SEQ ID NO. 2317 comprises peptides of SEQ ID NOs. 639, 548, 653, 589, 67, 69, 561, 461, 279, 547, 435, 478, 652, 486, 1253, 70, 469, and 549, with a spacer (AAY) separating each individual peptide sequence, and corresponds to constructs 19-22.

[0074] SEQ ID NO. 2318 comprises peptides of SEQ ID NOs. 639, 548, 653, 589, 67, 69, 486, 561, 461, 279, 547, 435, 478, 1253, 70, 652, 469, and 549, corresponding to constructs 23-26.

[0075] SEQ ID NO. 2319 comprises peptides of SEQ ID NOs. 639, 548, 653, 589, 67, 69, 486, 561, 461, 279, 547, 435, 478, 1253, 70, 652, 469, and 549, with a spacer (GPGPG) separating each individual peptide sequence, and corresponds to constructs 27-30.

[0076] SEQ ID NO. 2320 comprises peptides of SEQ ID NOs. 639, 548, 653, 589, 67, 69, 486, 561, 461, 279, 547, 435, 478, 1253, 70, 652, 469, and 549, with a spacer (GPGPG) separating each individual peptide sequence, and corresponds to constructs 31-34.

[0077] SEQ ID NO. 2321 comprises peptides of SEQ ID NOs. 478, 279, 652, 1253, 469, 363, 462, 377, 400, 187, 404, 461, 463, 496, 589, 70, 486, 32, 278, 128, 435, 653, 456, 492, 561, 548, 468, 67, 447, 549, 449, 69, 639, 547, 455, 467, 101 and 457, and corresponds to constructs 35-37.

[0078] SEQ ID NO. 2322 comprises peptides of SEQ ID NOs. 478, 279, 652, 1253, 469, 363, 462, 377, 400, 187, 404, 461, 463, 496, 589, 70, 486, 32, 278, 128, 435, 653, 456, 492, 561, 548, 468, 67, 447, 549, 449, 69, 639, 547, 455, 467, 101, 457, 640, 645, 670, 553, 711, 662, 621, 633, 651, 541, 584, 529, 497, 544, 527, 636, 578, 619, 554, 1156, 1248, 1280, 1288, 1440, 2021, 2204, 1561, 1437, 1106, 1584, 1556, 1560, 743, 1531, 2112 and 1049, with a spacer (GPGPG) separating peptides 101 and 457, and with a spacer (AAY) separating peptides 619 and 554, and corresponds to constructs 38-40.

[0079] SEQ ID NO. 2323 comprises the ASFV protein of GenBank Accession No. AYW33963.1, and corresponds to constructs 41 and 48.

[0080] SEQ ID NO. 2324 comprises the ASFV protein of GenBank Accession No. AYW34001.1, and corresponds to constructs 42 and 49.

[0081] SEQ ID NO. 2325 comprises the ASFV protein of GenBank Accession No. AYW34002.1, and corresponds to constructs 43 and 50.

[0082] SEQ ID NO. 2326 comprises the ASFV protein of GenBank Accession No. AYW34004.1, and corresponds to constructs 44 and 51.

[0083] SEQ ID NO. 2327 comprises the ASFV protein of GenBank Accession No. AYW34010.1, and corresponds to constructs 45 and 52.

[0084] SEQ ID NO. 2328 comprises the ASFV protein of GenBank Accession No. AYW34011.1, and corresponds to constructs 46 and 53.

[0085] SEQ ID NO. 2329 comprises the ASFV protein of GenBank Accession No. AYW34052.1, and corresponds to constructs 47 and 54.

[0086] SEQ ID NO. 2330 is construct 56, which comprises the peptides of SEQ ID NOs. 639,548, 653, 589, 67, 69, 561, 461, 279, 547, 435, 478, 652, 486, 1253, 70, 469 and 549, with GPGPG spacer sequences between peptides 653 and 589, 652 and 486, and 1253 and 70and with AAY spacer sequences between 69 and 56, 279 and 547 peptides sequences.

[0087] SEQ ID NO. 2331 is domain 1.1.

[0088] SEQ ID NO. 2332 is domain 3.1.

[0089] SEQ ID NO. 2333 is domain 3.1d.

[0090] SEQ ID NO. 2334 is domain 10.0.

[0091] SEQ ID NO. 2335 is domain 11.1.

[0092] SEQ ID NO. 2336 is an exemplary Sumo fusion protein.

[0093] SEQ ID NO. 2337 is an exemplary MBP fusion protein.

[0094] SEQ ID NO. 2338 is the lipoyl domain from Bacillus stearothermophilus E2p, which is included in whole or in part the HLT fusion protein.

[0095] SEQ ID NO. 2339 is a nucleotide sequence encoding the ASFV protein of GenBank Accession No. AYW33963.1.

[0096] SEQ ID NO. 2340 is a nucleotide sequence encoding the ASFV protein of GenBank Accession No. AYW34001.1.

[0097] SEQ ID NO. 2341 is a nucleotide sequence encoding the ASFV protein of GenBank Accession No. AYW34002.1.

[0098] SEQ ID NO. 2342 is a nucleotide sequence encoding the ASFV protein of GenBank Accession No. AYW34004.1.

[0099] SEQ ID NO. 2343 is a nucleotide sequence encoding the ASFV protein of GenBank Accession No. AYW34010.1.

[0100] SEQ ID NO. 2344 is a nucleotide sequence encoding the ASFV protein of GenBank Accession No. AYW34011.1.

[0101] SEQ ID NO. 2345 is a nucleotide sequence encoding the ASFV protein of GenBank Accession No. AYW34052.1.

### DETAILED DESCRIPTION

[0102] Identification of ASFV cytotoxic T lymphocyte (CTL) epitopes relevant for inducing protective immunity in swine by vaccination is challenging in part due to the heterogeneity of the T cell population and to variations in swine leukocyte antigen (SLA) class I antigen-binding specificities. However, effective vaccines are needed to reduce the spread and impact of ASF in swine populations.

[0103] The ASFV genome includes a conserved central region (CCR) and both left and right variable regions, each of which contains different numbers of five multigene family (MGF) genes. CCR gene products are involved in viral replication and assembly as well as in modulating immune evasion and host cellular functions. Variability among ASFV genomes results primarily from MGF member loss or gain.

[0104] Swine can survive infection with less-virulent isolates of ASFV and may become chronically infected. Surviving animals are resistant to challenge with related isolates of the virus, indicating that domestic swine can develop protective immunity against ASFV. During asymptomatic, non-virulent ASFV infections, natural killer cell activity increases in swine, suggesting that this cell type plays a role in ASFV immunity. Further, CD8+lymphocyte depletion from ASFV immune swine abrogates protective immunity against related virulent viruses. This suggests that the presence of ASFV-specific antibodies alone is insufficient to protect against ASFV infection and that the CD8+ lymphocyte subset plays an important role in ASFV protective immunity.

[0105] The present disclosure concerns immunogenic peptides, and compositions comprising such peptides. The disclosed peptides are used to form immunogenic peptide compositions, and/or nucleic acid-, viral or bacterial vector-, or host cell-based vaccines, and/or combinations thereof, that elicit or stimulate an immune response against ASFV. Such immunogenic compositions can be administered to an animal in combination with additional therapeutics, such as compounds or compositions aimed at reducing or alleviating the symptoms of ASF, or other compositions such as vaccines against other infections common in swine.

### I. Abbreviations

[0106] ASF African swine fever

[0107] ASFV African swine fever virus

[0108] CCID⁵⁰ Cell culture infectious dose 50%

[0109] CCR Conserved central region

[0110] CTL Cytotoxic T lymphocyte

[0111] dpv Days post (initial) vaccination

[0112] ELISA Enzyme-linked immunosorbent assay

[0113] ELISpot Enzyme-linked immunosorbent spot assays

[0114] INF-γ Interferon-gamma

[0115] MDA Maternally-derived antibody

[0116] MGF Multi-gene family

[0117] MHC Major histocompatibility complex

[0118] MS Mass spectrometry

[0119] PBMC Peripheral blood macrophage cell

[0120] PCR Polymerase chain reaction

[0121] qPCR Quantitative polymerase chain reaction

[0122] SLA Swine leukocyte antigen

### II. Terms and Definitions

[0123] Unless otherwise noted, technical terms are used according to conventional usage as would be understood by a person of ordinary skill in the art. Definitions of common terms in molecular biology may be found in Lewin's Genes X, ed. Krebs et al, Jones and Bartlett Publishers, 2009 (ISBN 0763766321); Kendrew et al. (eds.), The Encyclopedia of Molecular Biology, Blackwell Publishers, 1994 (ISBN 0632021829); Robert A. Meyers (ed.), Molecular Biology and Biotechnology: A Comprehensive Desk Reference, Wiley, John & Sons, Inc., 1995 (ISBN 0471186341); and George P. Rédei, Encyclopedic Dictionary of Genetics, Genomics, Proteomics and Informatics, 3rd Edition, Springer, 2008 (ISBN: 1402067534).

[0124] The following explanations of terms and abbreviations are provided to better describe the present disclosure and to guide those of ordinary skill in the art to practice the present disclosure. As used herein, “comprising” means “including” and the singular forms “a” or “an” or “the” refer to one or more than one unless the context clearly dictates otherwise. The term “or” refers to a single element of stated alternative elements or a combination of two or more elements, unless the context clearly indicates otherwise.

[0125] All publications, patent applications, patents, and other references mentioned herein are incorporated by reference in their entirety for all purposes. All sequences associated with the GenBank Accession Nos. mentioned herein are incorporated by reference in their entirety as of the present application's priority date. In case of conflict, the present specification, including explanations of terms, will control.

[0126] Although methods and materials similar or equivalent to those described herein can be used to practice or test the present disclosure, suitable methods and materials are described below. The materials, methods, and examples are illustrative only and not intended to be limiting. Other features of the disclosure will be apparent to a person of ordinary skill in the art from the following detailed description and the claims.

[0127] Unless otherwise indicated, all numbers expressing quantities of components, molecular weights, percentages, temperatures, times, and so forth, as used in the specification or claims are to be understood as being modified by the term “about.” Accordingly, unless otherwise indicated, implicitly or explicitly, the numerical parameters set forth are approximations that may depend on the desired properties sought and/or limits of detection under standard test conditions/methods. When directly and explicitly distinguishing embodiments from discussed prior art, the embodiment numbers are not approximates unless the word “about” is recited.

[0128] Amino acid residues in the disclosed sequence listing may be conservatively substituted or replaced by another residue with similar properties and characteristics. Typically, conservative substitutions have little to no impact on the activity of a resulting peptide. In one non-limiting example, a tyrosine residue in one peptide of a composition is substituted with a tryptophan residue. A peptide can be produced by chemical substitution to include one or more conservative amino acid substitutions, or can be produced by manipulating the nucleic acid sequence that encodes that peptide using, for example, standard procedures such as PCR or site-directed mutagenesis. Table 1 below provides conservative amino acid substitutions for expressly disclosed peptide sequences that are within the scope of the present disclosure.

TABLE 1
Conservative Amino Acid Substitutions

| Definition | Amino Acid | Symbol |
|---|---|---|
| Amino acids with aliphatic R- | Glycine | Gly-G |
| groups | Alanine | Ala-A |
| | Valine | Val-V |
| | Leucine | Leu-L |
| | Isoleucine | Ile-I |
| Amino acids with hydroxyl R- | Serine | Ser-S |
| groups | Threonine | Thr-T |
| Amino acids with sulfur-containing | Cysteine | Cys-C |
| R-groups | Methionine | Met-M |
| Acidic amino acids | Aspartic Acid | Asp-D |
| | Asparagine | Asn-N |
| | Glutamic Acid | Glu-E |
| | Glutamine | Gln-Q |
| Basic amino acids | Arginine | Arg-R |
| | Lysine | Lys-K |
| | Histidine | His-H |
| Amino acids with aromatic rings | Phenylalanine | Phe-F |
| | Tyrosine | Tyr-Y |
| | Tryptophan | Trp-W |
| Imino acids | Proline | Pro-P |

[0129] To facilitate review of the various embodiments of this disclosure, the following explanations of specific terms are provided:

[0130] Adjuvant: The term “adjuvant” as used herein means any substance or vehicle that enhances the effectiveness of a disclosed immunogenic composition, such as by enhancing the immune response to an antigen (for example an ASFV antigen) by an animal's immune system, such as a mammalian immune system. An adjuvant can be used to form a composition or compositions disclosed herein, for example as part of an ASFV vaccine composition. Adjuvants included in some embodiments of a composition disclosed herein can include, but are not limited to, aluminum salts, such as aluminum phosphate or aluminum hydroxide; various types of oils, such as vegetable oil, mineral oil, or cinnamon oil (See U.S. Patent No. 2006/0275515, “Antiviral preparations obtained from a natural cinnamon extract,” which is incorporated by reference herein); oil-in-water based adjuvants, such as Emulsigen®, Emulsigen®-D, Emulsigen®-DL90, Emulsigen®-P, Emulsigen®-BCL, Emulsimune®, or TS6; Amphigen®; pluronic polyols; saponin-based adjuvants, such as saponin, Quil A, and QS-21; nonionic block copolymers; microfluidized emulsions, such as 1MF59; water-in-oil adjuvants, such as ISA 720, ISA 71 VG, ISA 35, ISA 51, or ISA 50V; water-in-oil-in-water based adjuvants, such as ISA 206 or ISA 201 (such as Montanide ISA 201 VG); Freund's complete adjuvant; Freund's incomplete adjuvant; polylactide glycolide (PLGA); toll-like receptor (TLR) ligand-based adjuvants, such as TLR7/8 adjuvants, such as R848 (Resiquimod); Carbomer-based adjuvants, such as those containing 934P or 971P; polymer-based adjuvants, such as Carbigen™or PolygenTM; immune-stimulating complexes (ISCOMs); liposomes; polysaccharides; derivatized polysaccharides; oligonucleotides; cytokines; bacterial derivatives, such as trehalose-6,6-dibehenate (TDB) or cyclic diguanylate monophosphate (c-di-GMP); viral derivatives, such as polyinosinic-polycitidylic acid (poly (I:C)); or combinations thereof.

[0131] “Mucosally-adjuvanted” or “mucosal adjuvant” refer to an adjuvant or other compound, such as, for example, a polymer, that can interact with mucosal membranes and may stimulate an immune response. Additional information concerning mucosal adjuvants is provided by U.S. Patent No. 10,279,031, which is incorporated by reference herein. Mucous membranes include the optic (eye), oral, nasopharyngeal, anal, or vaginal membranes. The immune response that may be stimulated may include IgM, IgG, IgA, or a combination thereof. Compositions comprising such adjuvants may be applied to the mucosal membranes of an animal. Mucosal adjuvants may be “mucoadhesive,” in that they may adhere (generally non-covalently) to a mucosal membrane. Specific adjuvants with mucoadhesive properties include, but are not limited to, adjuvants comprising polymers, such as those comprising polyacrylic acids, such as Carbomers and Carbopols, or oil-in-water based adjuvants. Additionally, adjuvants containing nanoparticles may be used for intranasal administration. A person of ordinary skill in the art understands that a mucoadhesive adjuvant may contain one or a combination of any of the above adjuvants.

[0132] Administer, Administering, Administration: As used herein, administering a composition (e.g. an immunogenic composition) to an animal means to apply, give, or bring the composition into contact with the animal. Administration can be accomplished by a variety of routes, such as, for example, topical, oral, subcutaneous, transdermal, intrathecal, intramuscular, intravenous, intraperitoneal, intranasal, and similar routes, or combinations thereof.

[0133] As used herein, administering a composition mucosally includes directly administering the composition to an animal, such as by directly placing, such as, for example, spraying and/or dropping, the composition in the animal's mouth, nasal passages, or eye. Administering the composition mucosally also comprises providing the composition such that the animal administers the composition to itself, such as providing a composition for the animal to ingest. Exemplary methods of providing the composition include, but are not limited to, spraying the composition on the animal and/or otherwise topically applying the composition to the skin, or providing the composition in a form that the animal will eat. A person of ordinary skill in the art will understand that spraying may also facilitate direct administration because spray droplets may directly enter the mouth, nasal cavity, and/or eye of a swine. Another exemplary method of administering the composition to an animal is by intramuscular administration, such as, for example, by injection of a liquid formulation of the composition.

[0134] Disclosed compositions may be formulated for parenteral administration, such as, for example, by intradermal, intraarterial, intraperitoneal, intramuscular, subcutaneous, or intravenous routes, or combinations thereof. Examples of parenteral formulations of the compositions include, but are not limited to, suspensions that can be injected, solutions that can be injected, emulsions, and dry products that can be dissolved or suspended in an acceptable vehicle for injection. In addition, controlled-release parenteral formulations of the compositions can be prepared or administered, or both. Suitable materials for such administration include alcohols or a mixture or alcohols, such as a C₁-C₁₀ alcohol, such as ethanol, propanol, butanol, pentanol, hexanol, heptanol, octanol, nonanol, and/or decanol; polyols, such as polyethylene glycol; sterile water; glucose solution; saline solution; aqueous vehicles, such as, but not limited to, sodium chloride, dextrose, Dextrose Injection, Sodium Chloride Injection, Ringer's Injection, or Lactated Ringer's Injection, or combinations thereof non-aqueous vehicles such as, but not limited to, ethyl oleate, peanut oil, corn oil, cottonseed oil, sesame oil, or isopropyl myristate, or combinations thereof aqueous and non-aqueous isotonic sterile injection solutions, which can contain bacteriostats, buffers, antioxidants, or solutes that render the formulation isotonic within the blood of the recipient, or combinations thereof; and non-aqueous and aqueous suspensions that can be sterile and can include solubilizers, stabilizers, thickening agents, suspending agents, and preservatives, or combinations thereof. Formulations of the compositions can be presented in unit-dose or multi-dose containers, such as bottles, ampules, syringes, tubes, capsules, and vials.

[0135] African Swine Fever (ASF): “African swine fever” is caused by ASFV and typically presents as hemorrhagic fever. ASF is a highly contagious and deadly disease affecting both domestic and wild swine worldwide, with a mortality rate approaching 100% in domestic swine.

[0136] African Swine Fever Virus (ASFV): “African swine fever virus” is a virus that causes ASF in swine. The virus can be transmitted by ingestion, contact, or through ticks of the genus Ornithodoros. ASFV is the only member of the Asfarviridae family and has a linear, double-stranded DNA genome. In certain embodiments, the ASFV genome is 170-193 kbp and encodes 151-167 genes. The ASFV genome includes a conserved central region (CCR) of approximately 125 kbp and both left and right variable regions that each contain different numbers of five multigene family (MGF) genes. CCR gene products are involved in viral replication and assembly, and in modulating immune evasion and host cellular functions. Variability among ASFV genomes results primarily from MGF member loss or gain.

[0137] Multiple strains of ASFV have been identified, and nucleic acid sequences for ASFV are publicly available. For example, the ASFV strain identified as Ken06.Bus (GenBank Accession No. KM111295.1; incorporated by reference as present in GenBank as of the present application's priority date) provides an exemplary ASFV genome sequence.

[0138] Animal: “Animal” refers to a living multi-cellular vertebrate organism, a category that includes, for example, mammals and birds. The term mammal includes both human and non-human mammals, such as ungulates, and particularly swine. “Swine” (also referred to herein as “pigs”) includes members of genus Sus, such as Sus scrofa, such as Sus scrofa domesticus, such as the Yorkshire, Duroc, and/or Landrace swine breeds.

[0139] Antibody: An “antibody” is an immunoglobulin molecule produced by B lymphoid cells. Antibodies are evoked in humans or other animals by a specific antigen (immunogen). Antibodies are characterized by reacting specifically with the antigen in some demonstrable way. “Eliciting an antibody response” refers to the ability of an antigen or other molecule to induce the production of antibodies.

[0140] Antigen: “Antigen” refers to a compound, composition, or substance that can stimulate the production of antibodies or a T-cell response in an animal, including compositions that are injected or absorbed into an animal.

[0141] Viral antigens suitable for use in the present technology include inactivated (or killed) virus and/or a viral peptide, peptides, protein, or proteins, that may be isolated, purified or derived from a virus. Viral antigens can be derived from viruses propagated on a substrate, such as a cell culture or other substrate, or they may be derived or expressed recombinantly, or they may be synthesized. Typically, viral antigens include, but are not limited to, epitopes which are exposed on the surface of the virus during at least one stage of a life cycle. Viral antigens may be conserved across multiple serotypes or isolates. Viral antigens include antigens derived from one or more of the viruses disclosed herein.

[0142] Attenuated, Attenuation: An “attenuated” virus is a virus that is weakened and/or less virulent as compared to a non-attenuated form of the virus, which may be capable of causing disease. Attenuated viruses may stimulate an immune response and/or immunity but are not capable of causing disease. Replication of an attenuated virus in culture and/or a recipient may be the same as, similar to, or different from that of a strain or strains from which the attenuated virus was derived. Attenuation may be achieved by altering a virus using one or more methods that involve a single step and/or multiple steps. For example, attenuating genetic modifications, such as, for example, attenuating mutations and/or genetic reassortment, may be introduced into coding and/or non-coding regions of a viral genome through site-directed mutagenesis, chemical methods, irradiation, and/or recombinant techniques. Such methods are well known to those of ordinary skill in the art. An attenuated form of an otherwise disease-causing virus may also be identified through culturing techniques, such as passaging, and/or may result from genetic differences in a viral genome not induced, created, or caused by human intervention. Methods of determining whether an attenuated virus maintains similar or reduced antigenicity as compared to the strain or strains from which the attenuated virus was derived are also well known to those of ordinary skill in the art. Such methods may include, for example, chemical selection and/or nucleic acid screening, such as, for example, by probe hybridization or PCR. Attenuated viruses, such as, for example, certain embodiments of viral vectors disclosed herein, may be used to stimulate an immune response and/or induce immunity in a recipient, such as an animal, such as a swine.

[0143] Cinnamon: The term “cinnamon” refers to a product or products, such as, for example a cinnamon extract, a fraction of a cinnamon extract, and/or a precipitate of a cinnamon extract, derived from one or more members of the Cinnamomum genus. Such members may include, for example, C. zeylanicum, C. cassia (C. aromaticum), C. camphora, C. burmannii, C. verum, C. loureiroi, C. citriodorum, C. dubium, C. japonicum, C. kanehirae, C. virens, C. tamala, C. parthenoxylon, C. mercadoi, C. glaucescens, C. malabatrum, C. cambodianum, any other member of genus Cinnamomum, or combinations thereof. Typically, the one or more products is derived from the bark and/or leaves of one or more members of the Cinnamomum genus by one or more appropriate extraction, fractionation, and/or precipitation methods and/or similar methods. Combination: A combination includes two or more components that are administered such that the effective time period of at least one component overlaps with the effective time period of at least one other component. A component may be a composition. In some embodiments, the effective time periods of all components administered overlap with each other. In an exemplary embodiment of a combination comprising three components, the effective time period of the first component administered may overlap with the effective time periods of the second and third components, but the effective time period of the second component independently may or may not overlap with that of the third component. In an exemplary embodiment of a combination comprising four components, the effective time period of the first component administered overlaps with the effective time periods of the second, third, and fourth components; the effective time period of the second component overlaps with those of the first and fourth components, but not that of the third component; and the effective time period of the fourth component overlaps with that of the second and third components only. A combination may be a composition comprising the components, a composition comprising two or more individual components, or a composition comprising one or more components and another separate component (or components) or composition(s) comprising the remaining component(s). In some embodiments, the two or more components may comprise two or more different components administered substantially simultaneously or sequentially in any order, the same component administered at two or more different times, or a combination thereof.

[0144] Conditions sufficient for: The term “conditions sufficient for” refers to any environment that permits the desired activity, for example, that permits specific binding or hybridization between two nucleic acid molecules or that permits amplification and/or detection of a nucleic acid. Such an environment may include, but is not limited to, particular incubation conditions (such as time and/or temperature) or presence and/or concentration of particular factors, for example in a solution (such as buffer(s), salt(s), metal ion(s), detergent(s), nucleotide(s), enzyme(s), and so on).

[0145] Effective amount: The term “effective amount” or “therapeutically effective amount” or “immune-stimulatory amount” refers to the amount of an agent (such as one or more embodiments provided herein alone, in combination, or potentially in combination with other therapeutic agent(s)) that is sufficient to induce a desired biological result. That result may be amelioration or alleviation of the signs, symptoms, or causes of a disease, or any other desired alteration of a biological system. The amount can vary with the condition being treated, the stage of advancement of the condition, and the type and concentration of formulation applied. In some embodiments, an effective amount of an immune stimulatory composition is an amount which, when administered to a subject, is sufficient to engender a detectable immune response. Such a response may comprise, for instance, generation of an antibody specific to one or more of the epitopes provided in the immune stimulatory composition. Alternatively, the response may comprise a T-helper or CTL-based response to one or more of the epitopes provided in the immune stimulatory composition. All three of these responses may originate from naive or memory cells. In other embodiments, a “protective effective amount” of an immune stimulatory composition is an amount which, when administered to a subject, is sufficient to confer protective immunity to the subject. Appropriate amounts in any given instance will be readily apparent to those of ordinary skill in the art or capable of determination by routine experimentation such as vaccination and observation of an antibody response or vaccination followed by a challenge wherein the vaccinated animal performs better than a non-vaccinated animal that is challenged similarly.

[0146] Encoding: “Encoding” refers to the inherent property of specific sequences of nucleotides in a polynucleotide, such as a gene, a cDNA, or an mRNA, to serve as templates for synthesis of other polymers and macromolecules in biological processes having either a defined sequence of nucleotides (for example, rRNA, tRNA, and mRNA) or a defined sequence of amino acids and the biological properties resulting therefrom. Thus, a gene encodes a protein if transcription and translation of mRNA produced by that gene is capable of producing the protein, such as in a cell or other biological system. Both the coding strand, the nucleotide sequence of which is identical to the mRNA sequence and is usually provided in sequence listings, and noncoding strand, used as the template for transcription, of a gene or cDNA can be referred to as encoding the protein or other product of that gene or cDNA. Unless otherwise specified, a “nucleotide sequence encoding an amino acid sequence” includes all nucleotide sequences that are degenerate versions of each other and that encode the same amino acid sequence. Nucleotide sequences that encode proteins and RNA may include introns, exons, or both.

[0147] Epitope: An “epitope” is an antigenic determinant. These are chemical groups or peptide sequences on a molecule that are antigenic, i.e. that elicit an immune response. T cell epitopes are presented on the surface of an antigen-presenting cell, where they are bound to WIC molecules. Professional antigen-presenting cells, such as macrophages, dendritic cells, and B cells, are specialized to present WIC class II peptides, whereas most nucleated somatic cells present WIC class I peptides. T cell epitopes presented by WIC class I molecules are typically peptides between 8 and 11 amino acids in length, whereas WIC class II molecules present longer peptides, 13-17 amino acids in length. An antibody specifically binds a particular antigenic epitope on a peptide, such as one or more immunogenic peptides selected from SEQ ID NOs. 2-2273. In some examples a disclosed peptide is an epitope.

[0148] Expression: “Expression” refers to transcription and/or translation of a nucleic acid sequence. For example, a gene can be expressed when its DNA is transcribed into an RNA or RNA fragment, which in some examples is processed to form mRNA. A gene may also be expressed when its mRNA is translated into an amino acid sequence, such as a protein or a protein fragment. In a specific example, a heterologous gene is expressed when it is transcribed into an RNA. In another specific example, a heterologous gene is expressed when its RNA is translated into an amino acid sequence. Regulation of expression can include controls on transcription, translation, RNA transport and processing, degradation of intermediary molecules such as mRNA, or through activation, inactivation, compartmentalization or degradation of specific protein molecules after they are produced.

[0149] Expression Control Sequences: “Expression control sequences” are nucleic acid sequences that regulate the expression of a heterologous nucleic acid sequence to which they are operatively linked. Expression control sequences are operatively linked to a nucleic acid sequence when the expression control sequences control and regulate the transcription and, as appropriate, translation of the nucleic acid sequence. Thus, expression control sequences can include appropriate promoters, enhancers, transcription terminators, a start codon (ATG) in front of a protein-encoding gene, splicing signal for introns, maintenance of the correct reading frame of that gene to permit proper translation of mRNA, and stop codons. The term “control sequences” is intended to include, at a minimum, components whose presence can influence expression, and can also include additional components whose presence is advantageous, for example, leader sequences and fusion partner sequences. Expression control sequences can include a promoter.

[0150] Expression vector: An “expression vector” is a vector comprising a recombinant polynucleotide comprising expression control sequences operatively linked to a nucleotide sequence to be expressed. An expression vector comprises sufficient elements for expression; other elements for expression can be supplied by the host cell or in an in vitro expression system. Expression vectors include all those known in the art, such as cosmids, plasmids (e.g., naked or contained in liposomes) and viruses (e.g., lentiviruses, retroviruses, adenoviruses, and adeno-associated viruses) that incorporate the recombinant polynucleotide.

[0151] Host cell: “Host cell” refers to a cell or cells in which a vector can be propagated and its DNA expressed. The cell can be eukaryotic or prokaryotic. The cell can be mammalian, such as a swine cell. “Host cell” also includes any progeny of the subject host cell. It is understood that all progeny may or may not be identical to the parental cell since mutations may occur during replication. Such progeny are understood to be included when the term “host cell” is used.

[0152] Immune response: An “immune response” is a response of a cell of the immune system, such as a B-cell, T-cell, macrophage or polymorphonucleocyte, to a stimulus, such as an antigenic peptide. An immune response can include any cell of the body involved in a host defense response, including for example, an epithelial cell that secretes an interferon or a cytokine. An immune response includes, but is not limited to, an innate immune response or inflammation. As used herein, a protective immune response refers to an immune response that protects a subject from infection (prevents infection or prevents the development of disease associated with infection). Methods of measuring immune responses are known to those of ordinary skill in the art and include, for example, measuring proliferation and/or activity of lymphocytes (such as B or T cells), secretion of cytokines or chemokines, inflammation, antibody production and the like.

[0153] Immune stimulatory composition: The terms, “immune stimulatory composition” and “immunogenic composition” used herein mean a composition useful for stimulating or eliciting an immune response (or immunogenic response) in a subject. The immune stimulatory composition can be a protein antigen, a nucleic acid molecule (such as vector) used to express a protein antigen, or a combination thereof. In some embodiments, the immunogenic response is protective or provides protective immunity, in that it enables the subject to better resist infection with or disease progression from the virus against which the immune stimulatory composition is directed.

[0154] Immunize: To render a subject (such as a mammal, and particularly swine) protected, through stimulation of the subject's immune system (such as by vaccination), from infection by an infectious disease (such as ASFV).

[0155] Immunogen: A compound, composition, or substance that can stimulate an immune response, such as the production of antibodies or a T-cell response in an animal, including compositions that are injected or absorbed into an animal. Particular non-limiting examples of immunogens include immunogenic peptides of SEQ ID NOs. 2-2273, constructs of SEQ ID NOs. 2310-2330, domains of SEQ ID NOs: 2331-2335, and/or full- and/or partial-length ASFV proteins (for example, one or more proteins of SEQ ID NOs: 2323-2329), and/or nucleic acids, vectors, and/or host cells encoding such peptides, constructs, domains, and/or full- and/or partial-length ASFV proteins.

[0156] Inactivated: In the context of the present disclosure, an “inactivated” virus is one that has been altered to the extent that it not capable of establishing an infection in a host or host cell. Viruses can be inactivated using, for example, chemicals, heat, alterations in pH and/or irradiation (such as ultraviolet or gamma irradiation). Inactivated viruses are also referred to as “killed.” A “chemically inactivated” virus is a virus that has been inactivated using a chemical method, such as treatment with betapropiolactone, formaldehyde, glutaraldehyde, 2,2′-dithiodipyridine or binary ethylene imine. For a review of inactivation methods for virus vaccines, see Delrue et al. (Expert Rev Vaccines 11(6):695-719, 2012).

[0157] Infection: Infection or challenge means that the subject has been exposed to organisms that may produce disease causing the subject to suffer one or more clinical signs of the diseases when they have been exposed to such organisms.

[0158] Isolate, Isolated: An “isolated” biological component (such as a nucleic acid) has been substantially separated or purified away from biological or other components (for example biological components with which the component naturally occurs, such as chromosomal and extrachromosomal DNA, RNA, and proteins). Nucleic acids that have been “isolated” include nucleic acids purified by standard purification methods. The term also embraces nucleic acids prepared by recombinant expression in a host cell and subsequently purified, as well as chemically synthesized and purified nucleic acid molecules. Isolated does not require absolute purity, and can include, for example, nucleic acid molecules wherein at least 50%, 60%, 70%, 75%, 80%, 85%, 90%, 95%, 98%, 99%, or 99.9% of components in the original mixture with the desired materials are removed. As another example, an isolated biological component is one in which the biological component is more enriched than the biological component is in its natural environment within a cell, or other production vessel. An isolated nucleic acid may be in solution (e.g., water or an aqueous solution) or dried.

[0159] Peptide: A “peptide” is a polymer having at least two amino acids joined by a peptide bond, and more typically more than 2 amino acids joined together by amide bonds. Certain peptides, such as peptides having 25 or more amino acids, may be referred to as polypeptides. When the amino acids are alpha-amino acids, the L-optical isomer, the D-optical isomer, or combinations thereof, can be used. The term “peptide” as used herein is intended to encompass any amino acid sequence and includes modified sequences such as glycoproteins, and covers naturally occurring amino acid sequences, as well as those that are recombinantly or synthetically produced. The term “residue” or “amino acid residue” refers to an amino acid that is incorporated into a peptide. Exemplary peptides disclosed herein include the peptides of SEQ ID NOs. 2-2273, constructs of SEQ ID NOs. 2310-2330, domains of SEQ ID NOs: 2331-2335, and ASFV proteins, for example, of SEQ ID NOs. 2323-2329.

[0160] Polynucleotide, Nucleic Acid Molecule: The term “nucleic acid molecule” or “polynucleotide” refers to a polymeric form of nucleotide of at least two bases in length, unless otherwise specified. A nucleic acid molecule may include both sense and anti-sense strands of cDNA, genomic DNA, RNA, and/or mixed polymers and/or synthetic forms of the above. The term “nucleic acid molecule” as used herein is synonymous with “nucleic acid” and “polynucleotide.” The terms include single- and double-stranded forms of DNA, unless specified otherwise. A polynucleotide may include either or both naturally occurring nucleotides and modified nucleotides linked together by naturally occurring and/or non-naturally occurring nucleotide linkages. The nucleotides can be ribonucleotides, deoxyribonucleotides, or modified forms of either nucleotide.

[0161] A recombinant polynucleotide includes a polynucleotide that is not immediately contiguous with both of the coding sequences with which it is immediately contiguous (one on the 5′ end and one on the 3′ end) in the naturally occurring genome of the organism from which it is derived. A recombinant nucleic acid molecule can also be one that is not naturally occurring or has a sequence that is made by an artificial combination of two otherwise separated segments of sequence. This artificial combination is accomplished by chemical synthesis or by artificial manipulation of isolated segments of nucleic acids, such as, for example, by genetic engineering techniques known to those of ordinary skill in the art. The term therefore includes, for example, a recombinant DNA molecule that is incorporated into a vector; into an autonomously replicating plasmid or virus; or into the genomic DNA of a prokaryote or eukaryote, or which exists as a separate molecule (for example, a cDNA) independent of other sequences.

[0162] Preventing: Preventing a disease refers to inhibiting the full development of a disease.

[0163] Treating: Refers to a therapeutic intervention that ameliorates a sign or symptom of a disease or pathological condition after it has begun to develop.

[0164] Ameliorating: Refers to a reduction in the number or severity of one or more signs or symptoms of a disease.

[0165] Promoter: A “promoter” is a minimal nucleic acid sequence sufficient to direct transcription. A promoter is typically located in the 5′ region adjacent to (and upstream of) the transcriptional start site of a gene, and generally contains a functional TATA box that directs the expression of the gene. A promoter generally contains both structural and functional elements and provides a control point for regulating the transcription of the associated gene. Also included are those promoter elements that are sufficient to render promoter-dependent gene expression controllable for cell-type specific, tissue-specific, or inducible by external signals or agents; such elements may be located in the 5′ or 3′ regions of the gene. Both constitutive and inducible promoters are included (see for example, Bitter et al., Methods in Enzymology 153:516-544, 1987). For example, when cloning in bacterial systems, inducible promoters such as pL of bacteriophage lambda, plac, ptrp, ptac (ptrp-lac hybrid promoter) and the like may be used. In one embodiment, when cloning in mammalian cell systems, promoters derived from the genome of mammalian cells (such as metallothionein promoter) or from mammalian viruses (such as the retrovirus long terminal repeat; the adenovirus late promoter; the vaccinia virus 7.5K promoter) can be used. Promoters produced by recombinant DNA or synthetic techniques may also be used to provide for transcription of nucleic acid sequences.

[0166] A polynucleotide can be inserted into an expression vector that contains a promoter sequence, which facilitates the efficient transcription of the inserted genetic sequence of the host. The expression vector typically contains an origin of replication, a promoter, as well as specific nucleic acid sequences that allow phenotypic selection of transformed cells.

[0167] Purified: The term “purified” does not require absolute purity; rather, it is intended as a relative term. Thus, for example, a purified protein, virus, nucleic acid, or other compound is one that is isolated in whole or in part from associated proteins and other contaminants. In certain embodiments, the term “substantially purified” refers to a protein, virus, nucleic acid, or other compound that has been isolated from a cell, cell culture medium, or other crude preparation and subjected to purification to remove various components of the initial preparation, such as proteins, cellular debris, and other components.

[0168] Recombinant: A recombinant nucleic acid, protein, or virus is one that has a sequence that is not naturally occurring or has a sequence that is made by an artificial combination of two otherwise separated sequence segments. This artificial combination is often accomplished by chemical synthesis or, more commonly, by manipulating isolated segments of nucleic acids, for example, by genetic engineering techniques. The term recombinant includes nucleic acids, proteins and viruses that have been altered solely by addition, substitution, or deletion of a portion of a natural nucleic acid molecule, protein or virus.

[0169] Sample: A “sample” (or “biological sample”) refers to a specimen obtained from an organism, comprising, in certain embodiments, DNA (for example, genomic DNA or cDNA), RNA (including mRNA), protein, or combinations thereof. Examples include, but are not limited to isolated nucleic acids, cells, proteins, peptides, cell lysates, chromosomal preparations, tissues, and bodily fluids (such as blood, derivatives and fractions of blood (such as serum)), extracted galls, biopsied or surgically removed tissue (including tissues that are, for example, unfixed, frozen, fixed in formalin and/or embedded in paraffin), autopsy material, tears, milk, skin scrapes, surface washings, urine, sputum, cerebrospinal fluid, prostate fluid, pus, bone marrow aspirates, middle ear fluids, bronchoalveolar lavage, tracheal aspirates, nasopharyngeal swabs or aspirates, oropharyngeal swabs or aspirates, nasal washings, or saliva. In one example, a sample includes viral peptides, for example, specific to ASFV. In particular examples, samples are used directly (e.g., fresh or frozen), or can be manipulated prior to use, for example, by extraction (for example of nucleic acids), fixation (e.g., using formalin) and/or embedding in wax (such as formalin-fixed paraffin-embedded tissue samples).

[0170] Sequence identity/similarity: The identity/similarity between two or more nucleic acid sequences, or between two or more amino acid sequences, is expressed in terms of the identity or similarity between the sequences. Sequence identity can be measured in terms of percentage identity; the higher the percentage, the more identical the sequences are. Sequence similarity can be measured in terms of percentage similarity (which takes into account conservative amino acid substitutions); the higher the percentage, the more similar the sequences are. Homologs or orthologs of nucleic acid or amino acid sequences possess a relatively high degree of sequence identity/similarity when aligned using standard methods. In some embodiments, one or more disclosed peptides may comprise one or more amino acid sequences having at least 80% sequence identity (for example, 80%, 81%, 82%, 83%, 84%, 85%, 86%, 87%, 88%, 89%, 90%, 91%, 92%, 93%, 94%, 95%, 96%, 97%, 98%, 99%, 99.1%, 99.2%, 99.3%, 99.4%, 99.5%, 99.6%, 99.7%, 99.8%, 99.9%, or 100%) to an amino acid sequence or sequences of one or more peptides of SEQ ID NOs. 2-2273. In some embodiments, one or more disclosed nucleic acid molecules encoding one or more peptides of SEQ ID NOs. 2-2273 may comprise one or more nucleic acid sequences having at least 80% sequence identity (for example, 80%, 81%, 82%, 83%, 84%, 85%, 86%, 87%, 88%, 89%, 90%, 91%, 92%, 93%, 94%, 95%, 96%, 97%, 98%, 99%, 99.1%, 99.2%, 99.3%, 99.4%, 99.5%, 99.6%, 99.7%, 99.8%, 99.9%, or 100%) to the corresponding one or more nucleic acid sequences o1f SEQ ID NO. 1 encoding the one or more peptides.

[0171] Sequence alignment methods for comparison and to determine sequence identity or similarity are known to those of ordinary skill in the art. Various programs and alignment algorithms are described in: Smith & Waterman, Adv. Appl. Math. 2:482, 1981; Needleman & Wunsch, J. Mol. Biol. 48:443, 1970; Pearson & Lipman, Proc. Natl. Acad. Sci. USA 85:2444, 1988; Higgins & Sharp, Gene, 73:237-44, 1988; Higgins & Sharp, CABIOS 5:151-3, 1989; Corpet et al., Nuc. Acids Res. 16:10881-90, 1988; Huang et al. Computer Appls. in the Biosciences 8, 155-65, 1992; and Pearson et al., Meth. Mol. Mo. 24:307-31, 1994. Altschul et al., J. Mol. Biol. 215:403-10, 1990, presents a detailed consideration of sequence alignment methods and homology calculations.

[0172] The NCBI Basic Local Alignment Search Tool (BLAST) (Altschul et al., J. Mol. Biol. 215:403-10, 1990) is available from several sources, including the National Center for Biological Information (NCBI, National Library of Medicine, Building 38A, Room 8N805, Bethesda, Md. 20894) and on the internet, for use in connection with the sequence analysis programs blastp, blastn, blastx, tblastn and tblastx. Additional information can be found at the NCBI web site.

[0173] BLASTN is used to compare nucleic acid sequences, while BLASTP is used to compare amino acid sequences. If the two compared sequences share homology, then the designated output file will present those regions of homology as aligned sequences. If the two compared sequences do not share homology, then the designated output file will not present aligned sequences. vSubject: A “subject” is any multi-cellular vertebrate organism, a category that includes both human and non-human mammals (such as mice, rats, rabbits, sheep, swine, horses, cows, and non-human primates). Certain disclosed embodiments of the present invention particularly concern ungulates, even more particularly members of the family Suidae, including the genus Sus, such as Sus scrofa and Sus scrofa domesticus, and swine includes at least the genus Sus, with particular examples being Sus scrofa and Sus scrofa domesticus.

[0174] Transformed: A “transformed” cell is a cell into which has been introduced a nucleic acid molecule using molecular biology techniques known to those of ordinary skill in the art. The term encompasses all techniques by which a nucleic acid molecule might be introduced into a cell, including transfection with plasmid vectors, transformation with viral vectors, and introduction of naked DNA by lipofection, electroporation, and/or particle gun acceleration.

[0175] Vaccine: “Vaccine” refers to an immunogenic material, or a composition comprising an immunogenic material, capable of stimulating an immune response. Vaccines may be administered to prevent, ameliorate, or treat an infectious or other type of disease or diseases. The immunogenic material may include attenuated or inactivated microorganisms (such as bacteria or viruses), or antigenic proteins (including VLPs), peptides, or DNA derived from or encoding them, or combinations thereof. An attenuated vaccine is a virulent organism that has been modified to produce a less virulent form, but nevertheless retains the ability to elicit antibodies and an immune response against the virulent form. An inactivated vaccine is a previously virulent microorganism that has been killed with chemicals or heat, but which elicits antibodies against the virulent microorganism. Vaccines may elicit both prophylactic (preventative) and therapeutic responses. Methods of administration vary according to the vaccine, but may include inoculation, ingestion, inhalation, or other forms of administration. Vaccines may be administered with an adjuvant to boost the immune response.

[0176] Vector: A vector is a nucleic acid molecule allowing insertion of foreign nucleic acid without disrupting the ability of the vector to replicate and/or integrate in a host cell. A vector can include nucleic acid sequences that permit it to replicate in a host cell, such as an origin of replication. An insertional vector is capable of inserting itself into a host nucleic acid. A vector can also include one or more selectable marker genes and other genetic elements. An expression vector is a vector that contains regulatory sequences that allow transcription and translation of an inserted gene or genes.

[0177] Virus-like particle (VLP): Virus-like particles are made up of one or more viral proteins but lack the viral genome. Because VLPs lack a viral genome, they are non-infectious.

### III. Overview of Embodiments

[0178] Immunogenic peptides associated with ASFV are disclosed, and in certain embodiments include one or more peptides of SEQ ID NOs: 2-2273, one or more constructs of SEQ ID NOs. 2310-2330, one or more domains (also referred to herein as “hotspots” as described in Example 3) of SEQ ID NOs: 2331-2335, and/or one or more full- and/or partial-length ASFV proteins (for example, one or more proteins of SEQ ID NOs: 2323-2329), or a vector or vectors comprising at least one of the peptides, constructs, domains, and/or full- and/or partial-length ASFV proteins; a cell or cells comprising at least one of the peptides, constructs, domains, and/or full- and/or partial-length ASFV proteins; or a nucleic acid construct encoding at least one of the peptides, constructs, domains, and/or full- and/or partial-length ASFV proteins. In some embodiments, disclosed compositions may include a pharmaceutically acceptable carrier, an adjuvant, an additional therapeutic, or a combination thereof.

[0179] Disclosed compositions can be formulated for administration to an animal, particularly swine, by various routes typically used to deliver a composition to an animal. In some embodiments, the composition is formulated for intranasal administration. In other embodiments, the composition is formulated for intramuscular administration.

[0180] Also provided are containers that include one or more of the compositions disclosed herein. The container may be reusable or disposable. In some embodiments, the container is a syringe. In some examples, the syringe is reusable. In other examples, the syringe is disposable. Disposable syringes generally contain a single dose of a composition. In some embodiments, the container is a vial or a bottle, such as a glass or plastic vial or bottle. In some embodiments, the vial includes a single dose of the composition. In other embodiments, the vial includes more than one dose of the composition, such as 2, 3, 4, 5, 6, 7, 8, 9, or 10 or more doses of the composition. The vial can be sterilized prior to adding the composition.

[0181] Also provided are kits that include one or more containers disclosed herein. In some embodiments, the kit comprises a bottle (such as a bottle containing a composition), a syringe, a needle, or any combination thereof. In one non-limiting example, the kit can comprise a syringe containing the composition. In another non-limiting example, the kit can comprise a syringe that is empty. A composition can be in a liquid solution or suspension, such as in PBS or water, or another acceptable carrier. A composition disclosed herein can be in a dried, tablet, and/or powdered form, such as lyophilized and/or freeze dried. Dried, powdered, and/or lyophilized forms can also be reconstituted, for example with PBS, water, an organic solvent, or another acceptable carrier. A composition can also be in a gel or syrup form. The one or more containers in the kit can include one or more additional components, such as, for example, an adjuvant, a carrier, a stabilizer, an additional therapeutic, or combinations thereof, or the additional one or more components can be in one or more separate containers in the kit. In some examples, the kits also include a device or devices that permit administration of one or more of the compositions, or of one or more of the additional components, or combinations thereof, to an animal. Examples of such devices include a syringe or syringe atomizer, such as, for example, a nasal drug delivery device, or an intramuscular drug delivery device. A kit can include (for example, in the same box or separately) a document comprising details of a composition or compositions, such as, for example, instructions for administration and/or information describing the peptides, vectors, cells, nucleic acid constructs, or combinations thereof, within the composition.

[0182] Embodiments of a method of administering one or more disclosed peptides, constructs, domains, and/or full- and/or partial-length ASFV proteins, and/or one or more nucleic acids, vectors, host cells, and/or compositions comprising the one or more peptides, constructs, domains, and/or full- and/or partial-length ASFV proteins to an animal are also disclosed. Also provided are embodiments of a method of eliciting an immune response in an animal and/or immunizing an animal against ASFV by administering to the animal a therapeutically effective amount of one or more peptides, constructs, domains, and/or full- and/or partial-length ASFV proteins, and/or one or more nucleic acids, vectors, host cells, and/or compositions comprising the one or more peptides, constructs, domains, and/or full- and/or partial-length ASFV proteins disclosed herein. In some embodiments, the composition is administered intramuscularly. In other embodiments, the composition is administered intranasally. In some embodiments, the animal is a mammal. In some embodiments, the mammal is a swine. In some embodiments, the swine is Sus scrofa domesticus.

[0183] Disclosed compositions can be used to treat (such as vaccination) adult and/or juvenile animals. Thus, in some embodiments, the animal is an adult animal. In other embodiments, the animal is a juvenile animal.

[0184] A. African Swine Fever Virus Isolates

[0185] In some embodiments, a disclosed composition comprises one or more immunogenic ASFV peptides, constructs, domains, and/or full- and/or partial-length ASFV proteins. In particular embodiments, disclosed compositions comprise one or more peptides of SEQ ID NOs. 2-2273, produced by chemical synthesis, peptide isolation, and/or recombinant methods. The native peptides of SEQ ID NOs. 2-2273 are expressed by the ASFV strain, China/2018/AnhuiXCGQ. The ASFV strain China/2018/AnhuiXCGQ genome is provided by SEQ ID NO. 1, which is incorporated by reference herein. A person of ordinary skill in the art will appreciate that the techniques disclosed herein are applicable to ASFV strains other than China/2018/AnhuiXCGQ. Other exemplary (non-limiting) ASFV strains that can be used to generate ASFV immunogenic peptides, such as peptides of SEQ ID NOs. 2-2273, are shown in Table 2. In one non-limiting example, the composition includes a viral vector expressing 1-100, or 2-100, or 1-50, or 2-50, or 2-25, or 5-25 peptides, such as 1, 2, 3, 4, 5, 6, 7, 8, 9, 10, 11, 12, 13, 14, 15, 16, 17, 18, 19, 20, 21, 22, 23, 24 or 25 peptides, selected from SEQ ID NOs 2-2273, wherein the peptides are predicted immunogenic epitopes expressed by or contained within an ASFV strain, such as the China/2018/AnhuiXCGQ ASFV strain (Accession No. MK128995.1).

[0186] A composition comprising one or more immunogenic peptides of SEQ ID NOs. 2-2273, one or more constructs of SEQ ID NOs. 2310-2330, one or more domains of SEQ ID NOs: 2331-2335, and/or one or more full- and/or partial-length ASFV proteins of SEQ ID NOs: 2323-2329 may elicit or stimulate an immune response against, or result in immunization against, one or more strains of ASFV, such as against 2, 3, 4, 5, 10, 20, or 25 strains (for example, against 1-40 ASFV strains). In one non-limiting example, a composition comprising a viral vector expressing one or more peptides selected from SEQ ID NOs. 2-2273 can be used to immunize an animal against one or more strains of ASFV, such as those listed in Table 2.

TABLE 2
Exemplary African Swine Fever Viruses

| Strain | Size (Kb) | Accession Number |
|---|---|---|
| BA71V | 170.101 | NC_001659.2/U18466.2 |
| L60 | 182.362 | KM262844.1 |
| BA71 | 180.365 | KP055815.1 |
| NHV | 172.051 | KM262845.1 |
| Kenya 1950 | 193.886 | AY261360.1 |
| Ken05/Tk1 | 191.058 | KM111294.1 |
| Ken06.Bus | 184.368 | KM111295.1 |
| 26544/OG10 | 182.906 | KM102979.1 |
| Odintsovo_02/14 | 189.333 | KP843857.1 |
| Warthog | 186.528 | AY261366.1 |
| Warmbaths | 190.773 | AY261365.1 |
| Tengani 62 | 185.689 | AY261364.1 |
| Pretorisuskop/96/4 | 190.324 | AY261363.1 |
| Mkuzi 1979 | 192.714 | AY261362.1 |
| Malawi Lil-20/1 (1983) | 187.612 | AY261361.1 |
| 47/Ss/2008 | 184.638 | KX354450.1 |
| Benin 97/1 | 182.284 | AM712239.1 |
| OURT 88/3 | 171.719 | AM712240.1 |
| E75 | 181.187 | FN557520.1 |
| Georgia 2007/1 | 189.344 | FR682468.1 |
| R8 | 188.627 | MH025916.1 |
| R7 | 188.628 | MH025917.1 |
| R25 | 188.63 | MH025918.1 |
| N10 | 188.611 | MH025919.1 |
| R35 | 188.629 | MH025920.1 |
| ASFV/POL/2015/Podlaskie | 189.394 | MH681419.1 |
| Pol16_20186_o7 | 189.401 | MG939583.1 |
| Pol16_20538_o9 | 189.399 | MG939584.1 |
| Pol16_20540_o10 | 189.405 | MG939585.1 |
| Pol16_29413_o23 | 189.393 | MG939586.1 |
| Pol17_03029_C201 | 189.405 | MG939587.1 |
| Pol17_04461_C210 | 189.401 | MG939588.1 |
| ASFV-SY18 | 189.354 | MH766894.1 |
| Kashino 04/13 | 189.387 | KJ747406.1 |
| China/2018/AnhuiXCGQ | 189.393 | MK128995.1 |
| Pig/HLJ/2018 | 189.404 | MK333180.1 |
| DB/LN/2018 | 189.404 | MK333181.1 |
| Estonia 2014 | 182.446 | LS478113.1 |
| Pol17_05838_C220 | 189.393 | MG939589.1 |

[0187] B. Nucleic Acid Molecules

[0188] Certain disclosed embodiments include one or more nucleic acid molecules that encode the amino acid sequence of one or more peptides of SEQ ID NOs. 2-2273, one or more constructs of SEQ ID NOs. 2310-2330, one or more domains of SEQ ID NOs: 2331-2335, and/or one or more full- and/or partial-length ASFV proteins of SEQ ID NOs: 2323-2329 (such as one or more nucleic acid of SEQ ID NOs. 2339-2345), or that result from the substitution of some or any of the nucleotides of one or more of the nucleic acid molecules with other nucleotides, or from the insertion or deletion of one or more of such nucleotides, provided that the resultant peptides are still suitable for inducing an immune response or ameliorating a sign or symptom of an infection, and preferably are immunogenetically equivalent to the corresponding one or more peptides, constructs, domains, and/or full- and/or partial-length ASFV proteins. Based on this information, one of ordinary skill in the art can identify the nucleic acid sequence within an ASFV genome or other ASFV nucleic acid sequence (such as, for example, a DNA, cDNA, or RNA sequence) that corresponds, for example, to the peptide of SEQ ID NO: 3, or the peptide of SEQ ID NO: 29, or the peptide of SEQ ID NO: 1092. This can be accomplished, for example, by aligning an ASFV genome, such as that of ASFV strain China/2018/AnhuiXCGQ, provided in attached SEQ ID NO: 1, and one or more of the disclosed peptide sequences, for example by using a pair-wise sequence alignment tool, such as GeneWise, provided by the European Bioinformatics Institute of the European Molecular Biology Laboratory (EMBL-EBI).

[0189] Some disclosed embodiments concern one or more isolated nucleic acid molecules, such as one or more DNA, cDNA, and/or RNA molecules. In some embodiments, a composition may comprise one or more nucleic acid molecules that encode at least one peptide of SEQ ID NOs. 2-2273, one or more constructs of SEQ ID NOs. 2310-2330, one or more domains of SEQ ID NOs: 2331-2335, and/or one or more full- and/or partial-length ASFV proteins of SEQ ID NOs: 2323-2329 (such as one or more nucleic acid of SEQ ID NOs. 2339-2345). A nucleic acid molecule disclosed herein that encodes one or more peptides, constructs, domains, and/or full- and/or partial-length ASFV proteins may also encode additional components, such as, for example, one or more multiple cloning sites, one or more expression control sequences (for example, a heterologous promoter), and/or one or more selection-related sequences, such as a nucleic acid sequence enabling selection through antibiotic resistance. In one non-limiting example, nucleic acid molecules encoding more than one, such as, for example, 2, 3, 4, 5, 6, 7, 8, 9, 10, 15, 20, or 30 peptides of SEQ ID NOs. 2-2273, are incorporated into a larger nucleic acid molecule, comprising the peptides and additional components, that is expressed by a cell and/or by a viral or bacterial vector. In another non-limiting example, nucleic acid molecules encoding one or more peptides of SEQ ID NOs. 2-2273 are incorporated into a DNA vaccine that can be administered to an animal to stimulate or elicit an immune response to one or more of the expressed peptides.

[0190] C. Peptides

[0191] Certain disclosed embodiments concern immunogenic peptides selected from SEQ ID NOs. 2-2273, constructs selected from SEQ ID NOs. 2310-2330, domains selected from SEQ ID NOs: 2331-2335, and/or full- and/or partial-length ASFV proteins selected from SEQ ID NOs: 2323-2329. Some embodiments comprise one or more peptides, constructs, domains, and/or full- and/or partial-length ASFV proteins wherein at least one amino acid of a peptide is substituted with another one or more amino acids, or an amino acid in a peptide is inserted or deleted, or combinations thereof, provided that the resultant peptide or peptides are capable of inducing an immune response or ameliorating a sign or symptom of a viral infection. Some embodiments comprise full protein, or one or more peptides of 1 to 200 amino acids, including peptides having any number of amino acids within this range, such as 5 to at least 50 amino acids in length, such as, for example, 6-40, 7-30, or 8-20 amino acids in length, with particular embodiments having from 8 to 11 amino acids.

[0192] In certain embodiments, an immunogenic composition comprises one or more peptides selected from SEQ ID NOs. 2-2273. In one non-limiting example, the peptide or peptides of a composition are synthetic and are produced chemically, using techniques well known to those of ordinary skill in the art. In another non-limiting example, the peptide or peptides of a composition are obtained from intracellular synthesis using recombinant techniques known to those of ordinary skill in the art. In other embodiments, the one or more peptides included in a composition are expressed by or contained within, or both, a nucleic acid construct, a vector or vectors, a cell or cells, or a combination thereof. In yet other embodiments, the peptides may be isolated peptides.

[0193] A disclosed immunogenic peptide or peptides may be modified, for example for the purpose of stabilizing peptide conformation, improving peptide stability against enzymatic degradation, improving peptide stability in vivo, or combinations thereof. Such modifications can include, for example, glycosylation, PEGylation, lipidation, cyclisation, acetylation, amidation, conjugation, D-amino acid incorporation, a similar modification, or combinations thereof.

[0194] The swine major histocompatibility complex (WIC), also called swine leukocyte antigen (SLA) in pigs, is associated with the porcine immune response to viral infections and vaccinations. SLA class I glycoproteins are present in all nucleated cells and present endogenous antigens that most commonly originate in the infected cell cytoplasm. The SLA class I gene cluster includes three constitutively expressed genes: SLA-1, SLA-2, and SLA-3, all of which are highly polymorphic. The different allelic forms of these genes produce proteins with binding specificities for different peptide classes. Peptides presented by SLA class I molecules on the surface of an infected cell are typically 8-11 amino acids in length. Recognition of SLA class I glycoproteins by CD8 coreceptors on cytotoxic T cells leads to destruction of the infected cell and initiates the cell-mediated immune response component of the adaptive immune response. The cell-mediated immune response, along with the humoral response (i.e., synthesis of virus-specific antibodies by B lymphocytes), leads to the production of longer-lived “memory cells” that allow for a more rapid immune response (and immunity) to subsequent infections with the same or closely-related viruses.

[0195] Newer generations of algorithms aimed at predicting high affinity immunogenic peptides no longer focus solely on binding affinity (for example to an MEW molecule, which represents a single event), and thus are less likely to yield vast lists of putative peptides that include significant numbers of false positives. The peptides disclosed herein can be, and were, generated using various bioinformatics approaches, such as, for example, predictive algorithms that can identify high density clusters of putative immunogenic peptides and/or can identify potentially immunogenic peptides based on predicted MEW binding affinity. For example, Zvi et al. (PLoS ONE 7(5):e36440, 2012; incorporated herein by reference) assessed the ability of putative immunogenic epitopes of the bacterium, Francisella tularensis, to elicit a T-cell response by, in part, mapping clusters of overlapping predicted epitopes and ranking such “hotspot” regions according to the density of the epitopes. This method complements classical binding affinity-based algorithms. Similarly, the NetMHCpan-4.0 algorithm predicts interactions of peptides with MEW class I molecules by integrating in silico-derived binding affinity information and eluted ligands derived from mass spectrometry (MS) (Jurtz, et al. J. Immunol 199(9):3360-3368, 2017; incorporated herein by reference). This approach incorporates the increasing availability of MS-derived information about peptide-processing steps in the MEW class I presentation pathway and the length distributions of presented peptides to reduce the number of false positive hits that are typically generated from in silico-derived binding affinity information alone.

[0196] Immunogenicity of the disclosed peptides can be validated using various methods for measuring an immune response in vitro or in vivo. Such methods are well known to those of ordinary skill in the art, and the present invention is not limited to using specific assays. In one non-limiting example, relevant peptides can be synthesized and then screened against peripheral blood lymphocytes or spleen-derived cells using enzyme-linked immunosorbent spot (ELISpot) assays. In another non-limiting example, animals can be administered varying concentrations of a given composition or compositions, one or more times, at one or more different time intervals, and the presence of anti-peptide antibodies in treated versus non-treated animal serum can be established using enzyme-linked immune absorbent assays (ELISAs). In another non-limiting example, animals can be administered varying concentrations of a given composition or compositions, one or more times, at one or more different time intervals, challenged with an ASFV strain, and observed over time for ASF symptom development.

[0197] D. Constructs

[0198] In some embodiments, the one or more peptides of SEQ ID NOs. 2-2273, one or more

[0199] domains of SEQ ID NOs: 2331-2335 (also referred to as “hotspots,” see Example 3), and/or one or more full- and/or partial-length ASFV proteins (for example, one or more proteins of SEQ ID NOs. 2323-2329) is/are incorporated into a larger amino acid construct. Exemplary constructs are provided as SEQ ID NOs. 2310-2330. Such constructs can further comprise, for example, an N-terminal HLT, Sumo, and/or MBP fusion protein. Such constructs can comprise an N-terminal His-tag. For example, if a construct comprises a HLT, Sumo, and/or MBP fusion protein, the His-tag can be appended to the N-terminus of the fusion protein.

[0200] In some embodiments, one or more peptides of SEQ ID NOs. 2-2273, one or more domains of SEQ ID NOs: 2331-2335, and/or one or more full- and/or partial-length ASFV proteins (for example, one or more proteins of SEQ ID NOs. 2323-2329) included in one or more constructs may further comprise one or more spacer sequences (such as GPGPG and/or AAY) between all or some (such as 1, 2, 3, 4, 5, 6, 7, 8, 9, 10, 15, 20, or 25) of the sequences encoding the one or more peptides, domains, and/or full- and/or partial-length ASFV proteins. Additional spacer sequences that can be used in a construct disclosed herein are known to those of ordinary skill in the art, and the present disclosure is not limited to the particular spacer sequences disclosed herein.

[0201] In some embodiments, a construct comprises one or more nucleotide sequences encoding one or more detection sequences and, optionally, a linker (such as GSSG). A linker and detection sequence can be located, for example, at the C-terminus of the sequences encoding the one or more peptides, domains, full- and/or partial-length ASFV proteins, and/or spacer sequences, such that the linker is located between the C-terminus of the construct and the N-terminus of the detection sequence. Linkers and detection sequences and methods of, for example, tagging an expressed sequence for detection of a protein in a host cell, in a lysate, in a supernatant, in a subject, and/or in a sample obtained from a subject, are known to those of ordinary skill in the art, and the present disclosure is not limited to one or any specific detection sequence or to one or any specific linker sequence. An exemplary detection sequence is the HiBiT (Promega) sequence GSGWRLFKKLS, (or GSSGGSGWRLFKKLS with the optional exemplary linker) useful for detection of, for example, a protein product that results from expression of one or more nucleic acid molecules, such as in a lysate and/or supernatant collected from a host cell culture, such as from a host cell culture comprising E. coli cells transformed with the one or more nucleic acid molecules. Another exemplary detection sequence is a sequence encoding a histidine tag (His-tag) (such as a nucleotide sequence encoding the amino acid sequence HHHHHH, wherein each H is encoded by a CAC or CAT codon) useful for detection of, for example, a protein product that results from expression of one or more nucleic acid molecules, such as in a lysate and/or supernatant collected from a host cell culture, such as from a host cell culture comprising E. coli cells transformed with the one or more nucleic acid molecules.

[0202] E. Vectors and Host Cells

[0203] Multiple types and versions of vectors, nucleic acid molecules, and cells comprising one or more peptides of SEQ ID NOs. 2-2273, one or more constructs of SEQ ID NOs. 2310-2330, one or more domains of SEQ ID NOs: 2331-2335, and/or one or more full- and/or partial-length ASFV proteins (for example, one or more proteins of SEQ ID NOs. 2323-2329 and/or nucleic acids of SEQ ID NOs. 2339-2345) are within the scope of the present invention. Methods of producing the vectors, nucleic acid molecules, and cells are known to those of ordinary skill in the art, and the present disclosure is not limited to using one or more specific vector, nucleic acid molecule, or host cell production methods, or to specific vectors, nucleic acid molecules, or cell types. Generally, vectors and host cells that include or produce one or more peptides of SEQ ID NOs. 2-2273 comprise one or more nucleic acid molecules encoding one or more peptides of SEQ ID NOs. 2-2273 (such as one or more nucleic acid molecules of SEQ ID NOs. 2286-2309), and are typically generated to express the peptides. Naked nucleic acid molecules, such as, for example, a plasmid generated for use in a DNA vaccine, are typically produced to express one or more peptides of SEQ ID NOs. 2-2273 following cellular transformation with the nucleic acid molecules. Thus, one or more compositions comprising at least one vector, nucleic acid molecule, or host cell described herein, or combinations thereof, can be administered to an animal to, for example, produce an immune response against ASFV, and/or to immunize an animal against ASFV, or to ameliorate or eliminate one or more symptoms associated with ASF.

[0204] In some embodiments, the one or more nucleic acid molecules encoding one or more peptides of SEQ ID NOs. 2-2273, one or more domains of SEQ ID NOs: 2331-2335, and/or one or more full- and/or partial-length ASFV proteins (for example, one or more proteins of SEQ ID NOs. 2323-2329 and/or nucleic acids of SEQ ID NOs. 2339-2345) is incorporated into a larger nucleic acid construct for measuring expression of the one or more nucleic acid molecules, for example, in a host cell. Exemplary constructs are provided as SEQ ID NOs. 2310-2330. Such constructs can further comprise, for example, one or more plasmid vectors such as a pHLT, pSumo, and/or pMBP plasmid, for example to append an N-terminal HLT, Sumo, and/or MBP fusion protein. Such constructs can comprise an N-terminal His-tag. For example, if a construct comprises a HLT, Sumo, and/or MBP fusion protein, the His-tag can be appended to the N-terminus of the fusion protein.

[0205] In some embodiments, nucleic acid molecules encoding one or more peptides of SEQ ID NOs. 2-2273, one or more domains of SEQ ID NOs: 2331-2335, and/or one or more full- and/or partial-length ASFV proteins (for example, one or more proteins of SEQ ID NOs. 2323-2329 and/or nucleic acids of SEQ ID NOs. 2339-2345) included in one or more constructs further comprise one or more spacer sequences (such as GPGPG and/or AAY) between all or some (such as 1, 2, 3, 4, 5, 6, 7, 8, 9, 10, 15, 20, or 25) of the nucleotide sequences encoding the one or more peptides, domains, and/or full- and/or partial-length ASFV proteins. Additional spacer sequences that can be used in a nucleic acid molecule disclosed herein are known to those of ordinary skill in the art, and the present disclosure is not limited to the particular spacer sequences disclosed herein.

[0206] In some embodiments, a construct comprises one or more nucleotide sequences encoding one or more detection sequences and, optionally, a linker (such as GSSG). A linker and detection sequence can be located, for example, at the C-terminus of the nucleotide sequences encoding the one or more peptides, domains, full- and/or partial-length ASFV proteins, and/or spacer sequences, such that the linker is located between the C-terminus of the construct and the N-terminus of the detection sequence. Linkers and detection sequences and methods of, for example, tagging an expressed sequence for detection of a nucleic acid molecule or protein in a host cell, in a lysate, in a supernatant, in a subject, and/or in a sample obtained from a subject, are known to those of ordinary skill in the art, and the present disclosure is not limited to one or any specific detection sequence or to one or any specific linker sequence. An exemplary detection sequence is a nucleic acid molecule encoding the HiBiT (Promega) sequence GSGWRLFKKLS, (or GSSGGSGWRLFKKLS with the optional exemplary linker) useful for detection of, for example, a protein product that results from expression of one or more nucleic acid molecules, such as in a lysate and/or supernatant collected from a host cell culture, such as from a host cell culture comprising E. coli cells transformed with the one or more nucleic acid molecules. Another exemplary detection sequence is a sequence encoding a histidine tag (His-tag) (such as a nucleotide sequence encoding the amino acid sequence HHHHHH, wherein each H is encoded by a CAC or CAT codon) useful for detection of, for example, a protein product that results from expression of one or more nucleic acid molecules, such as in a lysate and/or supernatant collected from a host cell culture, such as from a host cell culture comprising E. coli cells transformed with the one or more nucleic acid molecules.

[0207] In some embodiments, one or more nucleic acid molecules encoding one or more peptides of SEQ ID NOs. 2-2273, one or more constructs of SEQ ID NOs. 2310-2330, one or more domains of SEQ ID NOs: 2331-2335, and/or one or more full- and/or partial-length ASFV proteins (for example, one or more proteins of SEQ ID NOs. 2323-2329 and/or nucleic acids of SEQ ID NOs. 2339-2345) is/are incorporated into a larger nucleic acid construct, such as a plasmid, for example, for direct introduction into an animal. Such a nucleic acid construct can be introduced into an animal by any suitable technique, such as through saline injection, particle gun acceleration, any suitable known or hereafter discovered method for administering a DNA or RNA vaccine to a subject, or combinations thereof, and such methods are known or will be understood by those of ordinary skill in the art. In one non-limiting example, one or more nucleic acid molecules encoding one or more, such as, for example, 1, 2, 3, 4, 5, 8, 10, 15, or 20, peptides of SEQ ID NOs. 2-2273, is incorporated into a plasmid, and a composition comprising the plasmid is administered to swine.

[0208] In some embodiments, a nucleic acid molecule or nucleic acid molecules encoding one or more peptides of SEQ ID NOs. 2-2273, one or more constructs of SEQ ID NOs. 2310-2330, one or more domains of SEQ ID NOs: 2331-2335, and/or one or more full- and/or partial-length ASFV proteins (for example, one or more proteins of SEQ ID NOs. 2323-2329 and/or nucleic acids of SEQ ID NOs. 2339-2345) may be incorporated into a viral vector. In some embodiments, the viral vector can be a herpesvirus, Adenovirus, Circovirus, Alphavirus, Orthopoxvirus, Avulavirus, Suipoxvirus, or any combination thereof. In one non-limiting example, the viral vector is a Pseudorabies virus, Porcine circovirus, Sindbis virus, Vaccinia virus, Newcastle virus, or Swinepox virus. In one specific non-limiting example, a nucleic acid molecule encoding one or more, such as, for example, 1, 2, 3, 4, 5, 8, 10, 15, or 20, peptides of SEQ ID NOs. 2-2273 is incorporated into a Vaccinia viral vector, and a composition comprising the vector is administered to swine.

[0209] In other embodiments, a nucleic acid molecule or nucleic acid molecules encoding one or more peptides of SEQ ID NOs. 2-2273, one or more constructs of SEQ ID NOs. 2310-2330, one or more domains of SEQ ID NOs: 2331-2335, and/or one or more full- and/or partial-length ASFV proteins (for example, one or more proteins of SEQ ID NOs. 2323-2329 and/or nucleic acids of SEQ ID NOs. 2339-2345) may be incorporated into a host cell. In one non-limiting example, the host cell is a recombinant yeast, such as, for example, a yeast of genus Pichia or genus Saccharomyces. In specific non-limiting examples, the recombinant yeast is Pichia pastoris or Saccharomyces cerevisiae. In another non-limiting example, the host cell is a recombinant prokaryote, such as, for example, a bacterium of genus Salmonella, Escherichia, Listeria, Shigella, Pseudomonas, Bordetella, Bacillus, Yersinia, Mycobacterium, Lactobacillus, Lactococcus, or Vibrio. In specific non-limiting examples, the recombinant bacterium is Salmonella enterica, Escherichia coli, Listeria monocytogenes, Shigella flexneri, Pseudomonas aeruginosa, Bacillus subtilis, Yersinia enterocolitica, Mycobacterium smegmatis, Mycobacterium bovis, Lactococcus lactis, or Vibrio anguillarum. One or more of the nucleic acid molecules can be incorporated into a host cell by one of several techniques by which a nucleic acid molecule might be introduced into a cell. Techniques, such as, for example, transformation with a plasmid encoding one or more peptides of SEQ ID NOs. 2-2273, are commonly known to a person of ordinary skill in the art. In one specific non-limiting example, a plasmid encoding one or more, such as, for example, 1, 2, 3, 4, 5, 8, 10, 15, or 20, peptides of SEQ ID NOs. 2-2273, is incorporated into a Saccharomyces cerevisiae host cell, and a composition comprising the transformed host cell is administered to swine. In another specific non-limiting example, a plasmid encoding one or more, such as, for example, 1, 2, 3, 4, 5, 8, 10, 15, or 20, peptides of SEQ ID NOs. 2-2273, is incorporated into a Salmonella enterica host cell, and a composition comprising the transformed host cell is administered to swine.

### IV. Composition

[0210] Disclosed herein are compositions comprising one or more immunogenic peptides of SEQ ID NOs. 2-2273, one or more constructs of SEQ ID NOs. 2310-2330, one or more domains of SEQ ID NOs: 2331-2335, and/or one or more full- and/or partial-length ASFV proteins (for example, one or more proteins of SEQ ID NOs. 2323-2329 and/or nucleic acids of SEQ ID NOs. 2339-2345), and/or comprising one or more vectors and/or cells and/or nucleic acid molecules comprising or encoding one or more of the peptides, constructs, domains, and/or full- and/or partial-length ASFV proteins. Disclosed compositions may be administered to an animal, particularly swine. One or more of the compositions can be used, for example, to elicit an immune response against ASFV, to immunize a subject against ASFV, to ameliorate and/or eliminate one or more symptoms associated with ASF, and/or to mitigate a future outbreak by serving as a pre-outbreak vaccine.

[0211] In some embodiments, the composition includes one or more peptides of SEQ ID NOs. 2-2273, one or more constructs of SEQ ID NOs. 2310-2330, one or more domains of SEQ ID NOs: 2331-2335, and/or one or more full- and/or partial-length ASFV proteins (for example, one or more proteins of SEQ ID NOs. 2323-2329 and/or nucleic acids of SEQ ID NOs. 2339-2345). In other embodiments, the composition includes a vector or vectors, such as, for example, a viral or bacterial vector, comprising the disclosed one or more peptides, constructs, domains, and/or full- or partial-length ASFV proteins. In one non-limiting example, the viral vector is a pseudorabies virus. In another non-limiting example, the viral vector is a modified vaccinia Ankara virus. In other embodiments, the composition includes a DNA plasmid and/or other nucleic acid construct encoding one or more peptides, constructs, domains, and/or full- or partial-length ASFV proteins. In another embodiment, the invention relates to one or more peptides of SEQ ID NOs. 2-2273, obtainable through expression of a nucleic acid construct and/or other encoding sequence. In another embodiment, the invention relates to a cell and/or vector containing a gene construct encoding the disclosed peptides. In one non-limiting example, one or more peptides of SEQ ID NOs. 2-2273, one or more constructs (for example, one or more amino acid sequences of SEQ ID NOs. 2310-2330), one or more domains (also referred to herein as “hotspots” as described in Example 3; for example, one or more amino acid sequences of SEQ ID NOs: 2331-2335), and/or one or more full- and/or partial-length ASFV proteins (for example, one or more proteins of SEQ ID NOs: 2323-2329 and/or nucleic acids of SEQ ID NOs. 2339-2345) is expressed in a cell and/or by one or more vectors. Thus, the process of expressing and/or producing peptides according to SEQ ID NOs. 2-2273 constitutes an additional aspect of this invention. Such peptides can also be produced synthetically as commonly understood by one of ordinary skill in the art to which this disclosure belongs. In one non-limiting example, the composition includes chemically synthesized peptides or peptides obtained from intracellular synthesis using recombinant techniques well known to those of ordinary skill in the art.

[0212] Disclosed immunogenic compositions may include other agents. Some embodiments concern a pharmaceutical composition comprising a therapeutically effective amount of a DNA or RNA construct comprising one or more peptides of SEQ ID NOs. 2-2273, one or more constructs of SEQ ID NOs. 2310-2330, one or more domains of SEQ ID NOs: 2331-2335, and/or one or more full- and/or partial-length ASFV proteins (for example, one or more proteins of SEQ ID NOs. 2323-2329 and/or nucleic acids of SEQ ID NOs. 2339-2345) or of a vector comprising one or more of the peptides, domains, and/or ASFV proteins, or of a cell comprising one or more of the peptides, domains, and/or ASFV proteins, together with one or more additional components. In non-limiting examples, the additional components are an appropriate carrier, such as, for example, PBS, and an appropriate adjuvant. In some embodiments, the peptides, nucleic acid constructs, vectors, and/or cells are present in an acceptable carrier such as saline, buffered saline, dextrose, water, glycerol, oil, ethanol, or combinations thereof. The carrier or composition containing the carrier, or both, can be sterile. The composition can also comprise suitable amounts of pH buffering agents, or wetting or emulsifying agents. The composition can also comprise conventional pharmaceutical materials such as, for example, acceptable buffers, preservatives, salts to adjust osmotic pressure, and similar. The composition can also contain adjuvant materials, such as, for example, oil adjuvants, oil-in-water adjuvants, water-in-oil adjuvants, water-in-oil-in-water adjuvants, aluminum hydroxide, potassium hydroxide, complete Freund's adjuvant, incomplete Freund's adjuvant, saponine, squalene, immune-stimulating complexes (ISCOMs), liposomes, polysaccharides, derivatized polysaccharides, oligonucleotides, cytokines, bacterial derivatives, viral derivatives, gel adjuvants, such as, for example, Emulsigen-D, or carbomer-based adjuvants, such as, for example, Carbigen. The composition can include one or more peptides of SEQ ID NOs. 2-2273 combined with one or more adjuvants by chemical conjugation, such as, for example, through oxime ligation, native chemical ligation, thioether ligation, hydrazine ligation between an aldehyde group and hydrazine (NH₂NH—) group, maleimide-thiol group reaction, CuAAC reaction, or similar. The composition can include one or more peptides of SEQ ID NOs. 2-2273, combined by polymerization using one or more chemical methods, recombinant techniques, and/or enzymatic reactions. Disclosed compositions can also include one or more peptides of SEQ ID NOs. 2-2273, having undergone modifications, such as, for example, glycosylation, PEGylation, lipidation, cyclisation, acetylation, amidation, conjugation, D-amino acid incorporation, or a similar modification, or combinations thereof. The composition can be a liquid solution or suspension, syrup, emulsion, microemulsion, aerosol, tablet, pill, capsule, gel, sustained release formulation, or powder. In one non-limiting example, the composition is a lyophilized or freeze-dried powder, or a liquid. The composition can be formulated as a suppository, with traditional binders and carriers such as triglycerides. Oral formulations can include standard carriers such as, for example, starch, mannitol, sodium saccharine, lactose, cellulose, magnesium stearate, magnesium carbonate, or combinations thereof. Mucosal formulations can include mucoadhesive polymers, such as, for example, chitosan. Disclosed compositions can also include one or more additional therapeutics, such as, for example, other vaccines, including, but not limited to, subunit vaccines, live attenuated virus vaccines, DNA vaccines, RNAi vaccines, inactivated vaccines, bacterial vaccines, yeast vaccines, or combinations thereof. Such vaccines may also include, for example, porcine reproductive and respiratory syndrome virus vaccines, porcine circovirus-2 vaccines, immunocastration vaccines, other specific vaccines, or combinations thereof. Other therapeutics can also include compounds or compositions aimed at reducing or alleviating the symptoms of ASF, such as, for example, anti-inflammatories, anti-diarrheals, appetite stimulants, anti-nausea medications, respiratory therapeutics, iron dextran, or combinations thereof.

### V. Methods of Stimulating and Measuring an Immune Response

[0213] The disclosed invention also concerns embodiments of a method of using the disclosed compositions. For example, one embodiment comprises providing at least one peptide, vector, nucleic acid molecule, and/or composition described herein, and administering an effective amount thereof to an animal, such as swine. One non-limiting example of a method according to the present disclosure includes eliciting or stimulating an immune response in an animal to one or more peptides of SEQ ID NOs. 2-2273, one or more constructs of SEQ ID NOs. 2310-2330, one or more domains of SEQ ID NOs: 2331-2335, and/or one or more full- and/or partial-length ASFV proteins (for example, one or more proteins of SEQ ID NOs. 2323-2329 and/or nucleic acids of SEQ ID NOs. 2339-2345). In another non-limiting example, the method includes vaccinating or immunizing an animal against ASFV using a composition comprising a viral vector expressing one or more peptides of SEQ ID NOs. 2-2273, one or more constructs of SEQ ID NOs. 2310-2330, one or more domains of SEQ ID NOs: 2331-2335, and/or one or more full- and/or partial-length ASFV proteins (for example, one or more proteins of SEQ ID NOs. 2323-2329 and/or nucleic acids of SEQ ID NOs. 2339-2345). In some embodiments, the composition is administered using any suitable route of administration, such as, for example, intramuscular or intranasal administration. Examples of animals that can be administered at least one of the disclosed compositions include animals that can be (or are) infected with ASFV. Examples of such animals include but are not limited to, mammalian subjects, ungulates, such as swine, such as, for example, a sow during pregnancy. An animal administered a composition can be an adult or a juvenile.

[0214] Disclosed compositions can be used to stimulate or elicit an immune response to ASFV in an animal. In some examples, the method comprises administering a therapeutically effective amount of a composition comprising one or more peptides of SEQ ID NOs. 2-2273, one or more constructs of SEQ ID NOs. 2310-2330, one or more domains of SEQ ID NOs: 2331-2335, and/or one or more full- and/or partial-length ASFV proteins (for example, one or more proteins of SEQ ID NOs. 2323-2329 and/or nucleic acids of SEQ ID NOs. 2339-2345) to an animal, particularly swine, to elicit an immune response to ASFV in the animal. Methods of determining whether an immune response has been elicited or stimulated are known to those of ordinary skill in the art. In some examples, an immune response is achieved if there is an observed reduction in illness (such as reduction in symptoms), reduction in viral titers, reduction in mortality rate, or a combination thereof. In some examples, the disclosed method reduces symptoms of ASFV infection in an animal administered a composition entirely, or by at least 10%, at least 20%, at least 30%, at least 40%, or at least 50%, at least 60%, at least 70%, at least 80%, or at least 90%, for example as compared to an equivalent animal not administered the composition. In some examples, the disclosed composition or method, or both, reduces viral titer in an animal administered a composition, such as by at least 10% to at least 100%, 20% to at least 100%, 30% to at least 100%, 40% to at least 100%, 50% to at least 100%, 60% to at least 100%, 70% to at least 100%, 80% to at least 100%, 90% to at least 100%, at least 2-fold, at least 3-fold, at least 4-fold, or at least 5-fold, for example as compared to an equivalent animal not administered the composition. In some examples, the disclosed method increases survival following subsequent viral challenge in animals administered a composition by at least 10%, at least 20%, at least 30%, at least 40%, at least 50%, at least 60%, at least 70%, at least 80%, at least 90%, or at least 95%, for example as compared to an equivalent animal not administered the composition.

[0215] In some examples, the method includes administering a therapeutically effective amount of a composition comprising a viral vector expressing one or more peptides of SEQ ID NOs. 2-2273, one or more constructs of SEQ ID NOs. 2310-2330, one or more domains of SEQ ID NOs: 2331-2335, and/or one or more full- and/or partial-length ASFV proteins (for example, one or more proteins of SEQ ID NOs. 2323-2329 and/or nucleic acids of SEQ ID NOs. 2339-2345), thereby immunizing the animal against ASFV. In some examples, an immune response is achieved if there is an observed reduction in illness (such as reduction in symptoms), reduction in viral titers, protection from death, or a combination thereof.

[0216] In some embodiments, an animal can be administered (such as intramuscularly) a therapeutically effective amount of about 1 to about 100 μg of each of at least one peptide of SEQ ID NOs. 2-2273, one or more constructs of SEQ ID NOs. 2310-2330, one or more domains of SEQ ID NOs: 2331-2335, and/or one or more full- and/or partial-length ASFV proteins (for example, one or more proteins of SEQ ID NOs. 2323-2329 and/or nucleic acids of SEQ ID NOs. 2339-2345). In some embodiments, an animal can be administered (such as intramuscularly) a therapeutically effective amount of about 10³ to about 10⁹ CCID⁵⁰, such as about 10⁶ CCID⁵⁰, of each of at least one viral vector, for example, a pseudorabies virus or a modified vaccinia Ankara virus, expressing one or more peptides of SEQ ID NOs. 2-2273, one or more constructs of SEQ ID NOs. 2310-2330, one or more domains of SEQ ID NOs: 2331-2335, and/or one or more full- and/or partial-length ASFV proteins (for example, one or more proteins of SEQ ID NOs. 2323-2329 and/or nucleic acids of SEQ ID NOs. 2339-2345). However, a person of ordinary skill in the art is capable of determining a therapeutically effective amount (for example, an amount that provides protection against ASFV infection) of, for example, one or more peptides of SEQ ID NOs. 2-2273, one or more constructs of SEQ ID NOs. 2310-2330, one or more domains of SEQ ID NOs: 2331-2335, and/or one or more full- and/or partial-length ASFV proteins (for example, one or more proteins of SEQ ID NOs. 2323-2329 and/or nucleic acids of SEQ ID NOs. 2339-2345), or of a viral vector expressing one or more of the peptides, domains, and/or ASFV proteins, to administer to an animal.

[0217] Methods for determining whether a composition disclosed herein can (or did) stimulate or elicit an immune response, such as achieve successful immune protection, are known to those of ordinary skill in the art, and the disclosure is not limited to the use of specific assays. Following administration of a composition provided herein, one or more assays may be performed to assess the resulting immune response. In one non-limiting example, one or more assays are also performed prior to administration of the composition to provide a baseline or control. Samples, such as a blood, serum, and/or peripheral blood macrophage cell (PBMC) sample, can be collected from an animal following administration of a composition. In some examples, a sample, or samples, is collected at least 1 week, at least 2 weeks, at least 3 weeks, at least 4 weeks, at least 5 weeks, at least 8 weeks, or at least 10 weeks (such as 1, 2, 3, 4, 5, 6, 7, 8, 9, 10, 11, or 12 weeks) after the first administration. Additional samples can also be obtained, for example following subsequent administrations of the same or different composition or compositions.

### VI. Methods of Administration

[0218] Embodiments of peptides, immunogenic compositions, vectors, cells, and/or nucleic acid constructs can be administered to an animal by any of the routes typically used for introducing a pharmaceutical composition or compositions into an animal. Methods of administration include, but are not limited to, intramuscular, oral, intravenous, intradermal, intraperitoneal, subcutaneous, parenteral, mucosal, rectal, vaginal, inhalation, intranasal, or combinations thereof. Parenteral administration, such as, for example, intramuscular, intravenous, or subcutaneous administration, is commonly achieved by injection. Administration can be local or systemic, or combinations thereof. Injectables can be prepared, for example, as emulsions, as solid forms suitable for solution or suspension in liquid prior to injection, or as liquid suspensions or solutions. Injection suspensions or solutions can be prepared from sterile powders, tablets, granules, or similar, or combinations thereof.

[0219] The composition or compositions administered to an animal may be administered with at least one acceptable carrier. Acceptable carriers are determined in part by the particular composition being administered, as well as by the particular method used to administer the composition. Thus, there is a wide variety of acceptable formulations of compositions of the present disclosure.

[0220] Preparations for parenteral administration include sterile aqueous or non-aqueous solutions, suspensions, and/or emulsions, such as, for example, oil-in-water and/or water-in-oil emulsions. Preparations for parenteral administration can also include adjuvants and/or polymers, such as, for example, CpG oligodeoxynucleotides (CpG ODN), Carbigen, Polygen, ISA 201 or 206 (such as Montanide ISA 201 VG), Quil-A, trehalose-6,6-dibehenate (TBD), toll-like receptor (TLR) ligand-based adjuvants (such as TLR7/8 adjuvants, such as R848 (Resiquimod)), cyclic diguanylate monophosphate (c-di-GMP), polyinosinic-polycytidylic acid (poly (I:C)), or combinations thereof. Examples of non-aqueous solvents are alcohols or glycols, such as propylene glycol, polyethylene glycol, vegetable oils such as olive oil, and injectable organic esters such as ethyl oleate. Aqueous carriers include water, alcoholic/aqueous solutions, emulsions, or suspensions, including saline and buffered media. Parenteral vehicles include sodium chloride solution, Ringer's dextrose, dextrose and sodium chloride, lactated Ringer's, or fixed oils. Intravenous vehicles include fluid and nutrient replenishers, electrolyte replenishers (such as those based on Ringer's dextrose), and similar. Preservatives and other additives may also be present, such as, for example, antimicrobials, antioxidants, chelating agents, inert gases and similar.

[0221] In some examples, disclosed embodiments are formulated for mucosal vaccination, such as oral, intranasal, pulmonary, rectal, and vaginal. In one non-limiting example, this is achieved by intranasal administration. For example, the disclosed compositions can include one or more biodegradable, polymeric carriers that interact with one or more mucosal membranes. Polymers such as polylactide-co-glycolide (PLGA), chitosan (for example in the form of chitosan nanoparticles, such as N-trimethyl chitosan (TMC)-based nanoparticles), alginate (such as sodium alginate), carbopol, and carbopol-based polymers can be included. The composition can include one or more hydrophilic polymers, such as sodium alginate or carbopol, for example in combination with starch. The composition can be formulated as a particulate delivery system used for nasal administration. Thus, the composition can include liposomes, immune-stimulating complexes (ISCOMs) and/or polymeric particles, such as virosomes. The compositions can also include one or more lipopeptides of bacterial origin, or their synthetic derivatives, such as Pam3Cys, (Pam2Cys, single/multiple-chain palmitic acids and lipoamino acids (LAAs). The compositions can also include one or more adjuvants, such as, for example, one or more of CpG oligodeoxynucleotides (CpG ODN), Flt3 ligand, Carbigen, c-di-GMP, poly (I:C), and monophosphoryl lipid A (MLA).

[0222] Compositions disclosed herein may be administered to maternally-derived antibody (MDA) positive animals. If a given vaccine stimulates a humoral immune response, sows may transfer MDAs to piglets, and this may delay the opportunity to vaccinate piglets. However, a T cell epitope vaccine may not be delayed by MDA.

[0223] A. Timing of Administration

[0224] Disclosed compositions may be administered as a single dose or as multiple doses (for example, boosters). In some examples, a first administration is followed by a second administration. For example, the second administration can be with the same, or with a different composition than the first composition administered. In one specific non-limiting example, the second administration is with the same composition as the first composition administered. In another specific non-liming example, the second administration is with a different composition than the first composition administered. For example, if a first composition comprised 10 peptides selected from SEQ ID NOs: 2-2273, the second composition could include 20 different peptides selected from SEQ ID NOs: 2-2273, wherein all 30 peptides are different. In some examples, an animal is administered one or more compositions comprising a viral vector expressing one or more peptides of SEQ ID NOs. 2-2273, one or more constructs of SEQ ID NOs. 2310-2330, one or more domains of SEQ ID NOs: 2331-2335, and/or one or more full- and/or partial-length ASFV proteins (for example, one or more proteins of SEQ ID NOs. 2323-2329 and/or nucleic acids of SEQ ID NOs. 2339-2345), and is subsequently administered one or more vaccines comprising a live attenuated ASFV.

[0225] In some examples, a composition or compositions is administered in multiple doses, such as 2, 3, 4, 5, 6, 7, 8, 9, or 10 doses (such as 2-4 doses). In these examples, the timing between the doses can be at least 1 week, at least 2 weeks, at least 3 weeks, at least 4 weeks, at least 6 weeks, at least 8 weeks, at least 12 weeks, at least 2 months, at least 3 months, at least 4 months, at least 5 months, at least 6 months, at least 1 year, at least 2 years, at least 5 years, or at least 10 years, such as 1-4 weeks, 2-3 weeks, 1-6 months, 2-4 months, 1-10 years, or 2-5 years, or combinations thereof. In one non-limiting example, wherein there are at least three administrations, the timing between the first and second, and second and third doses, can be the same or different.

[0226] B. Dosages

[0227] The dose administered to a subject in the context of the present disclosure should be sufficient to induce a beneficial therapeutic response in a subject over time, or to inhibit ASFV infection. The dose can vary from subject-to-subject depending on the species, age, weight, and general condition of the subject, the severity of the infection being treated, whether the dose is being used to treat, alleviate, or inoculate against an infection, the particular composition being used, and/or the mode of administration. An appropriate dose can be determined by one of ordinary skill in the art using routine experimentation.

[0228] In some embodiments, the animal is administered (for example, intramuscularly) about 0.1 to about 100 μg of a given peptide in the composition, such as about 1 μg to about 5 μg, about 1 μg to about 50 μg, about 1 μg to about 25 μg, about 5 μg to about 20 μg, or about 10 μg to about 15 μg of each of the at least one peptide in the composition. In one specific non-limiting example, the subject is administered (for example, intramuscularly) about 10 μg, about 15 μg, about 20 μg, or about 30 μg of each of at least two different peptides. In one non-limiting example, the animal is administered one composition at a first administration amount, a second composition at a second administration amount, and a third composition at a third administration amount. Moreover, the composition or compositions at each administration may be the same or different.

[0229] In some embodiments, the animal is administered (for example, intramuscularly) about 10² to about 10⁹ CCID⁵⁰ of a pseudorabies viral vector or a modified vaccinia Ankara viral vector expressing at least one peptide of SEQ ID NOs. 2-2273, one or more constructs of SEQ ID NOs. 2310-2330, one or more domains of SEQ ID NOs: 2331-2335, and/or one or more full- and/or partial-length ASFV proteins (for example, one or more proteins of SEQ ID NOs. 2323-2329 and/or nucleic acids of SEQ ID NOs. 2339-2345), such as about 10³ to about 10⁵, about 10⁴ to about 10⁶, about 10⁵ to about 10⁷, about 10⁶ to about 10⁸, or about 10⁷ to about 10⁹, of the viral vector within a single dose. In one specific non-limiting example, the subject is administered (for example, intramuscularly) about 10⁴, about 10⁵, about 10⁶, or about 10⁷ CCID⁵⁰ of each of at least two viral vectors expressing the same or different one or more peptides of SEQ ID NOs. 2-2273, one or more constructs of SEQ ID NOs. 2310-2330, one or more domains of SEQ ID NOs: 2331-2335, and/or one or more full- and/or partial-length ASFV proteins (for example, one or more proteins of SEQ ID NOs. 2323-2329 and/or nucleic acids of SEQ ID NOs. 2339-2345). In another non-limiting example, the animal is administered one viral vector at a first administration amount, a second viral vector at a second administration amount, and a third viral vector at a third administration amount.

### VII. Cinnamon Extract Adjuvants

[0230] Adjuvants included in some embodiments of compositions disclosed herein can include a cinnamon-derived product, such as cinnamon oil (See U.S. Patent No. 2006/0275515, “Antiviral preparations obtained from a natural cinnamon extract,” which is incorporated by reference herein). Certain cinnamon-derived adjuvants concern a composition produced by extraction, or by fractionating an extraction composition. Particular embodiments concern an aqueous extract of cinnamon bark (Cinnamomum sp.), but other polar solvents, such as, for example, alcohols and glycols, also may be used. One or more compounds in the extract, or in a fraction of the extract, may be processed to form a precipitate. For example, active antiviral fractions of the extract may have an absorbance at 280 nm of between 15 and 20 O.D., and/or may comprise one or more substances having a molecular weight greater than 10 kDa, such as at about 15 O.D. In one preferred embodiment, an isolated active fraction of cinnamon bark having antiviral activity has in addition one or more of the following chemical properties:
[0231] 1. It is precipitated by various chloride salts such as KCl, NaCl, MgCl₂, SrCl₂, CuCl₂, or ZnCl₂.
[0232] 2. It exhibits absorbance at 280 nm of 15 O.D/mg. cm.
[0233] 3. It maintains most of its activity after incubation in 0.1M NaOH, or 0.1M HCl, or 0.1M H₂SO₄.
[0234] 4. It can be extracted into an aqueous solution, or into an organic solution, such as an alcoholic solvent or acetone in a relatively inexpensive and simple manner.
[0235] 5. It can be maintained for a long period of time (at least two years) as a stable powder or in solution in a refrigerator or at room temperature;
[0236] 6. It is heat-stable and can thus be sterilized at temperature up to at least 134° C.

[0237] Useful extraction compositions may be made by any suitable process. One suitable embodiment comprises forming a cinnamon bark powder, and forming a solution or suspension comprising the cinnamon bark powder. The process can involve forming an appropriate solution using either an aqueous solvent or an organic solvent. Certain embodiments concern forming an aqueous solution, and the solution may then be centrifuged and a supernatant collected that includes an antiviral active fraction. A precipitate may also be formed, such as by evaporation or by adding a precipitation aid, such as a salt, and more particularly a chloride salt, such as KCl, NaCl, MgCl₂, SrCl₂, CuCl₂, ZnCl₂ or combinations thereof.

[0238] The precipitate may be further fractionated or purified. One such process is a chromatographic process. For example, the precipitate may be dissolved in water at a pH of about 7. The solution can be added to a Sepharose column and eluted with a buffer and a saccharide. A more specific process comprises using a 0.02 M aqueous phosphate buffer at a pH of 7.0 to form a solution, forming a precipitate by adding 0.15 M KCl or 0.08 M MgCl₂, dissolving the precipitate in water or 0.01 M phosphate buffer at pH 7.0, adding the precipitate solution to a Sepharose 4B column and performing stepwise elution using phosphate buffer and galactose, where an active antiviral material elutes from the column with 0.15 M galactose.

[0239] In one preferred embodiment, the cinnamon extract is obtained using the following process:

[0240] (i) grinding cinnamon bark into powder and stirring it into an aqueous buffer to obtain a solution;

[0241] (ii) centrifuging the solution and separating a supernatant; and

[0242] (iii) introducing a salt, such as, for example, a chloride salt, to obtain a precipitate. The process may further comprise of the following steps:

[0243] (iv) dissolving the precipitate obtained in step (iii) above in water or buffer at an essentially neutral pH;

[0244] (v) separating the solution on a sepharose or Sephadex column; and

[0245] (vi) eluting the solution with suitable buffer and varying concentrations of saccharide,

[0246] preferably galactose, to obtain the antiviral fractions. In another preferred embodiment, the cinnamon extract is obtained from cinnamon bark, Cinnamomum sp., using the following method:

[0247] (i) grinding the bark into powder;

[0248] (ii) stirring the bark in aqueous phosphate buffer 0.01 M or 0.02 M, pH 7.0;

[0249] (iii) separating the supernatant by centrifugation to be used as the crude neutralizing extract;

[0250] (iv) precipitating the active ingredient in the crude extract using 0.15 M KCl or 0.08 M MgCl₂;

[0251] (v) dissolving the precipitate in water or 0.01 M phosphate buffer at pH 7.0;

[0252] (vi) loading the solution onto a column of sepharose 4B followed by a stepwise elution with phosphate buffer and various concentrations of galactose; and

[0253] (vii) eluting the active antiviral material from the column by 0.15 M galactose.

[0254] A nutraceutical and/or pharmaceutical composition can be formed using either an effective amount of an extract solution, a separate fraction thereof, a precipitate, a composition comprising the precipitate, and/or combinations thereof, by adding a pharmaceutically or nutraceutically acceptable carrier. Such compositions can also include one, or two or more, of the peptides, nucleic acids, vectors, host cells, or compositions thereof, as disclosed herein. Such compositions can also include other components, such as at least one additional therapeutic or nutraceutic component.

[0255] The compounds and/or compositions so formed have antiviral activity. In general, the virus may be an enveloped virus, such as African Swine Fever Virus, Orthomyxoviruses, Paramyxoviruses, Herpesviruses, Retroviruses, Coronaviruses, Hepadnaviruses, Poxviruses, Togaviruses, Flaviviruses, Filoviruses, Rhabdoviruses, and Bunyaviruses. Accordingly, disclosed embodiments also concern a method for treating a viral infection comprising administering to a subject in need thereof a therapeutically effective amount of a cinnamon extract composition, a cinnamon extract precipitate composition, or such compositions when combined with one or more ASFV peptides disclosed herein. Such compositions can be administered by any suitable method as will be understood by a person of ordinary skill in the art, such as orally, nasally, parenterally, subcutaneously and/or intramuscularly.

[0256] Certain disclosed embodiments concern a method for producing a neutralized virus for immunization, and a neutralized virus vaccine produced using the neutralized virus. One such embodiment comprises contacting native viruses, such as ASFV, with an effective amount of a cinnamon extract composition and/or a cinnamon extract precipitate composition. Vaccine formulations comprising the neutralized virus can be administered to a subject as discussed above.

[0257] Isolated active fractions of cinnamon bark may exhibit absorbance at 280 nm of 15 O.D./mg·cm³. The active fraction remains active even after incubation in acids or bases, such as 0.1 M NaOH, or 0.1 M HCl. Solid active fractions and solutions comprising such active components can be stored at room temperature or below for substantial time period, such as several years. Active precipitate fractions are heat-stable and can be sterilized at temperatures greater than 100° C. and potentially up to at least 134° C.

[0258] Compositions of the present invention may protect infected erythrocyte cells from the activity of viruses pre-absorbed on the erythrocytes. Thus, the cinnamon extract of the present invention may be considered as effective treatment of cells already pre-absorbed with the virus. Furthermore, pre-absorption of the cinnamon extract of the invention onto cells may have a prophylactic effect in protecting the cells from subsequent viral infection. Additionally, compositions of the present invention may protect infected erythrocyte cells from the activity of viruses pre-absorbed on the cinnamon extract and/or on one or more other components of one or more compositions disclosed herein, which one or more compositions are then contacted with cells.

[0259] The present invention also concerns compositions, which may be nutraceutical or pharmaceutical compositions, comprising the cinnamon extract of the invention together with a pharmaceutically or nutraceutically acceptable carrier. The composition may be in a liquid, solid, or semi solid state.

[0260] Furthermore, the present invention concerns a pharmaceutical composition or a nutraceutical composition for the treatment of an infection comprising as an active ingredient an effective amount of the cinnamon extract together with a carrier suitable for pharmaceutical or nutraceutical compositions.

[0261] The present invention further concerns a method for treating a subject suffering from viral infection. The method comprises administering to a subject in need of such treatment an effective amount of compositions disclosed herein. The viral infection is preferably an enveloped virus infection; more preferably a virus of the family Orthomyxoviruses, Paramyxoviruses, Herpesviruses, Retroviruses, Coronaviruses, Hepadnaviruses, Poxviruses, Togaviruses, Flaviviruses, Filoviruses, Rhabdoviruses, or Bunyaviruses; most preferably the virus infection is caused by a virus selected from avian influenza virus, Influenza virus, Parainfluenza virus (also referred to herein as “the Sendai virus”), NDV virus (paramyxovirus), HIV viruses, HSV-1 virus, HSFV viruses, ASFV, TILV (orthomyxoviruses) and KHV (herpesvirus).

[0262] The active material was isolated by three steps as follows: a) the bark was purchased in the market and was ground into powder before it was stirred in aqueous phosphate buffer 0.01 M-0.02 M, pH 7.0, overnight. The supernatant was separated by centrifugation and was used as the crude neutralizing extract; b) The active material in the crude extract was precipitated by KCl 0.15 M or 0.08M MgCl₂, and the precipitate was dissolved in water or 0.01 M phosphate buffer, pH 7.0 (CE ppt.); c) This solution was submitted onto column of Sepharose 4B followed by a stepwise elution with phosphate buffer and various concentrations of galactose. The active antiviral material may be eluted from the column by 0.15M galactose.

[0263] Hemagglutinating unit (HAU) may be determined using 4% washed human red blood cells. Viral hemolytic activity has been tested in vitro by first attaching free virus onto 1 ml of 4% washed human erythrocytes for 15 minutes at room temperature, and then incubating the infected cells in 37° C. for 3 hours followed by centrifugation. The hemolytic activity of the viruses has been determined by measuring the absorbance of the supernatant at 540 nm.

[0264] In a particular embodiment, cinnamon extract precipitate may be dissolved in water or in 0.01 M phosphate buffer and added to a 10 ml Sepharose 4B column pre-washed with phosphate buffer 0.01 M at pH 7.0. The column may be washed with the buffer followed by stepwise elution of galactose 0.15 M, 0.3 M, and various concentrations of acetonitrile. An active antiviral material has been found in fraction b eluted from the column by 0.15 M galactose or fraction II.

[0265] Various amounts of crude extract have been incubated with 256 HAU samples of Influenza A PR8 virus to test the inhibitory effect on the hemolytic activity of the virus. Hemolytic activity of the virus was totally inhibited by 250 μg of the crude extract.

[0266] Various amounts of crude extract have been incubated with 256 HAU samples of Sendai virus to test the inhibitory effect on the hemolytic activity of the virus. Virus alone or the crude extract alone has been used as controls. The hemolytic activity of the virus was totally inhibited by 250 μg of the crude extract.

[0267] Cinnamon extract fractions have been dialyzed against water. An active component has been found to have a molecular weight greater than 10 KDa (the dialysis bag cut-off).

[0268] In vivo antiviral activity has been determined using mice. Mice have been injected with 250 μl of PBS containing 128 HAU of Influenza A virus alone or Influenza A mixed with 250 μg of the crude extract or the crude extract alone. Mice infected with the virus alone lost weight and most died within 7-10 days. Mice injected with a mixture of the virus and the crude extract continued to gain weight on par with those injected with the crude extract alone. Mice have inhaled 50 μl of water containing 64 HAU of Sendai virus alone, virus mixed with 125 μg of crude extract, or the crude extract alone. The mice were weighed at 2-3 day intervals. Mice infected with the virus alone lost weight and most died within 7-10 days. Mice treated intranasally with a mixture of the virus and the crude extract recovered and gained weight. Each group included 10 mice.

[0269] Mice have been injected with 128 HAU of Influenza A PR8 pre-incubated with 250 μg of the cinnamon extract inhibitor for 30 minutes at room temperature. The mice were weighed every 2-3 days for 3 weeks. No deaths occurred among the mice infected with the virus pre-incubated with the inhibitor.

[0270] 100 PFU aliquots of HSV1 were mixed with 50 μg of a cinnamon extract precipitate according to the present invention. Cells with HSV alone were detached and washed from plate. Cells with HSV mixed with 50 μg cinnamon extract precipitate were not affected. This established that the extracts of the invention protected the Vero cells from HSV-1 infection.

[0271] Tests have also established that there is direct correlation between inhibition and increasing amounts of a cinnamon extract and/or cinnamon extract precipitate according to the present invention.

[0272] Mice have also been infected with 32 HAU of Sendai virus pre-incubated for 20 minutes with 125 μg of cinnamon extract or a cinnamon extract precipitate, or treated with cinnamon extract or a cinnamon extract precipitate immediately after viral infection. Mice treated with the inhibitor started to gain weight 8 days post infection (P=0.017), whereas the control group which had not been treated with the inhibitor continued losing weight.

[0273] Mice have been immunized intranasally with 32 HAU of Sendai virus mixed with 125 μg of a cinnamon extract or a cinnamon extract precipitate. A control group received only water. Three weeks post immunization both groups of mice were infected with 64 HAU of the Sendai virus alone. Immunized mice were not affected by the subsequent virus infection and kept gaining weight (P=0.013).

[0274] Mice have been immunized by the Sendai virus mixed with a cinnamon extract or a cinnamon extract precipitate either orally or subcutaneously. Two weeks after a third administration of the virus plus a cinnamon extract or a cinnamon extract precipitate, the mice of both groups were infected with 80 HAU of Sendai virus, as were control mice. Immunized mice were not affected by subsequent virus infection and continued gaining weight and no difference was observed between oral or subcutaneous administration.

[0275] HIV-1 activity has been tested on MT2 cells (CD4+T-cells) using the model of syncytia formation in cell culture. 20-120 μl aliquots of cinnamon extract precipitate, 0.5 mg/ml, were incubated with 50 μl virus for 5 minutes in a final volume of 200 μl RPMI medium at room temperature. 90 μl of each mixture were added to the cells in duplicates. After 3 days, syncytia were observed in 95-100% of the control wells without cinnamon extract precipitate and served as the 100% infectivity to which other wells were compared. However, 8-10 μg of cinnamon extract precipitate in 8-10 μl completely neutralized the virus. Inhibition of avian influenza H9N2 by VNF has been tested by an in vitro Hemolysis Assay as done previously (Borkow and Ovadia, 1994, 1999). The hemolytic activity of the influenza virus (release of hemoglobin from red blood cells) was examined on human erythrocytes. Washed diluted erythrocytes were mixed with the virus alone or with a virus preincubated with a cinnamon extract or a cinnamon extract precipitate for 20 minutes at room temperature. Excess virus was removed by washing with PBS, followed by addition of 200 μl of 0.1 M sodium citrate buffer at pH 4.6 for three minutes to fuse the virus with the erythrocytes. The mixture was then washed in PBS, centrifuged and incubated in 0.8 ml PBS at 37 ° C. for 3 hours. Intact erythrocytes were removed by centrifugation and 300 μl aliquots from the supernatant of each sample were placed into wells of an ELISA plate for absorbance measurement in an ELISA plate reader at 540 nm. The hemolytic activity of the virus was neutralized by the cinnamon extract or a cinnamon extract precipitate according to the present invention in a dose dependent manner.

[0276] A cinnamon extract or a cinnamon extract precipitate has also inhibited the hemolytic activity of an avian influenza virus after it was attached on the infected cells as it did to the free virus.

[0277] Hemagglutinating activity of a Newcastle Disease virus (NDV) has also been tested. Preincubation of the virus (108 EID50) with 10 mg cinnamon extract or a cinnamon extract precipitate according to the present invention resulted in Hemagglutination Inhibition.

[0278] In-vivo (In-ova) Neutralization of Avian Influenza H9N2 by a cinnamon extract or a cinnamon extract precipitate has also been tested. One milliliter containing 4.5 mg of a cinnamon extract precipitate according to the present invention and 107 EID50 of influenza H9N2 were incubated for 20 minutes at room temperature before preparing 10-fold dilutions from this mixture. 0.1 ml of each dilution was injected into each allantoic cavity of 10 embryonated chicken SPF eggs. Dilutions of the virus alone or cinnamon extract precipitate were used as controls (10 eggs in each group). The cinnamon extract precipitate decreased the viral infectivity by 5 logs and increased the embryo survival at a similar rate.

[0279] In vivo neutralization of Newcastle Disease Virus by a cinnamon extract or a cinnamon extract precipitate has also been tested. One ml containing 5 mg of a cinnamon extract precipitate according to the present invention and 108 EID⁵⁰ of Newcastle Disease Virus was incubated for 20 minutes at room temperature before preparing 10-fold dilutions from this mixture. 0.1 ml of each dilution was injected into each allantoic cavity of 10 chicken SPF eggs. Virus alone and a cinnamon extract or a cinnamon extract precipitate alone were used as controls. A cinnamon extract or a cinnamon extract precipitate decreased the viral infectivity by 5 logs and increased embryo survival similarly.

[0280] The serum titer of chicks following vaccination with NDV in combination with a cinnamon extract precipitate has been reviewed. In ovo vaccination of a first group was performed by injecting 0.1 ml of PBS containing 105.3 EID⁵° of NDV preincubated with 1 mg of VNF into SPF chicken eggs at day 18 of the embryonic development. A second group was intraocularly vaccinated 1-2 days after. Non-vaccinated chicks were used as controls. Blood samples were withdrawn periodically and serum titer was determined by hemagglutination inhibition assay of serial dilutions of each serum. Serum titer after in ovo vaccination was as good as intraocular vaccination.

### VIII. Examples

[0281] The following examples are provided to illustrate certain features and/or embodiments of the disclosure. These examples should not be construed to limit the disclosure to the particular features or embodiments described. Changes therein and other uses that are encompassed within the spirit of the invention as defined by the scope of the claims will occur to those of ordinary skill in the art.

### Example 1

### Peptide Prediction and Synthesis

[0282] This example describes a method for predicting putative peptides immunogenic against ASFV and for synthesizing the peptides for efficacy studies, both in vitro and in vivo.

[0283] The complete genome of the ASFV China/2018/AnhuiXCGQ strain (GenBank Accession No. MK128995.1) was screened for CD8+epitopes in relation to the known SLA class I alleles of the Yorkshire, Landrace, and Duroc swine breed lines. Candidate peptides were evaluated according to four criteria: (1) predicted binding affinity of the peptide to SLA class I molecules; (2) position in highly dense clusters of putative epitopes as a method to enrich positive responders; (3) coverage of SLA alleles and prioritization of highly prevalent alleles; and (4) the nature of the source protein (giving precedence to immunogens). Out of 212,394 putative peptides, 2,272 were selected for further evaluation (FIG. 1).

[0284] First, a total of 49 SLA alleles found in the Yorkshire, Landrace, and Duroc breed lines were identified and functionally clustered into 29 supertypes using the WIC cluster tool. In the case of functional overlap, one representative allele from the given supertype was chosen for use in peptide binding predictions (representative alleles are shown in bold in Table 3). The choice of the representative allele was based on the prediction accuracy value generated by the cluster mapping analysis. A computational analysis was conducted to identify peptides predicted to bind to the SLA class I molecules using the entire ASFV China/2018/AnhuiXCGQ strain proteome (179 open reading frame products). The NetMHCpan-4.0 algorithm predicts peptide interactions with WIC class I molecules by integrating in silico-derived binding affinity information and eluted ligands derived from MS data (Jurtz, et al. J. Immunol 199(9):3360-3368, 2017). Thus, the NetMHCpan-4.0 algorithm may generate peptides predicted to be immunogenic against ASFV. This algorithm was used to predict the binding affinities of 8, 9, 10, or 11 amino acid-long peptides derived from the 179 open reading frames of the ASFV China/2018/AnhuiXCGQ strain (GenBank Accession No. MK128995.1) (a total of 212,394 peptides) for each of the 29 representative alleles shown in bold in Table 3. Out of 212,394 peptides, 31,868 peptides had an allelic coverage of one or more supertypes (FIG. 1).

TABLE 3
Relevant SLA alleles functionally clustered into 29 supertypes,
with representative alleles shown in bold.

| | | Prediction |
|---|---|---|
| Supertype | Allele | accuracy |
| S1 | SLA-3: 0101 | 0.879 |
| S1 | SLA-1: 1103 | 0.66 |
| S2 | SLA-3: 0601 | 0.868 |
| S2 | SLA-3: 0701 | 0.954 |
| S2 | SLA-3-0401 | 1 |
| S2 | SLA-3: 0402 | 0.912 |
| S2 | SLA-3-0404 | 0.868 |
| S3 | SLA-2: 060201 | ND |
| S4 | SLA-3: 0306 | 0.587 |
| S4 | SLA-3: 0502 | 0.739 |
| S4 | SLA-3: 0503 | 0.739 |
| S4 | SLA-3: 0506 | 0.739 |
| S5 | SLA-2: 1603 | ND |
| S6 | SLA-1: 0703 | 0.749 |
| S6 | SLA-1: 0705 | 0.811 |
| S7 | SLA-1: 0811 | 0.582 |
| S8 | SLA-2: 1005 | ND |
| S9 | SLA-1: 0806 | 0.663 |
| S9 | SLA-1: 0807 | 0.683 |
| S10 | SLA-2: 1002 | 0.656 |
| S11 | SLA-1: 1401 | 0.572 |
| S12 | SLA-2: 0903 | ND |
| S13 | SLA-2: 1001 | 0.589 |
| S13 | SLA-2: 1004 | ND |
| S14 | SLA-1: 0901 | 0.711 |
| S15 | SLA-2: 0202 | 0.647 |
| S16 | SLA-1: 0704 | 0.615 |
| S17 | SLA-1: 0805 | 0.584 |
| S17 | SLA-2: 1006 | ND |
| S17 | SLA-1: 0808 | 0.67 |
| S18 | SLA-1: 0701 | 0.653 |
| S18 | SLA-1: 0702 | 0.653 |
| S19 | SLA-1: 0401 | 1 |
| S19 | SLA-1: 1301 | 0.842 |
| S19 | SLA-1: 1701 | 0.824 |
| S20 | SLA-1: 0801 | 0.791 |
| S20 | SLA-1: 0812 | 0.791 |
| S21 | SLA-2: 0401 | 1 |
| S21 | SLA-2: 0402 | 0.903 |
| S22 | SLA-1: 1501 | 0.741 |
| S23 | SLA-1: 1201 | 0.727 |
| S23 | SLA-2: 0102 | 0.776 |
| S24 | SLA-2: 0101 | 0.683 |
| S25 | SLA-2: 0501 | 0.667 |
| S25 | SLA-2: 0503 | 0.574 |
| S26 | SLA-2: 0504 | ND |
| S27 | SLA-1: 0101 | 0.771 |
| S28 | SLA-2: 0502 | 0.688 |
| S29 | SLA-2: 0505 | ND |

[0285] The SLA-1*0401, SLA-2*0402, SLA-3*0402, SLA-1*0702, and SLA-2*0502 alleles are highly prevalent in the swine population, including within the Duroc, Yorkshire, and Landrace breed lines. The computationally-determined 31,867 peptides were tested for coverage of these five common alleles, and a total of 2,559 peptides provided coverage of at least three of the five alleles. To further reduce the number of peptides for evaluation, only peptides covering at least 15 alleles in general (of the 49 SLA alleles relevant to the Yorkshire, Landrace, and Duroc breed lines) were selected from the list of the 2,556. This 1,190 peptide list was denoted as Subset C (peptides selected by Coverage).

[0286] The 31,868 peptides predicted to bind SLA class I molecules were further used in a cluster mapping analysis conducted using the HotSpots program package developed at the Israel Institute for Biological Research. A cluster was defined as a peptide having a minimum length of 8 amino acids (the shortest predictive peptide length) and a maximum length of 25 amino acids. Clusters contained two or more peptides, with each peptide overlapping or in tandem with another peptide. The mapping analysis generated 9,654 clusters containing 31,815 unique peptides (after removal of duplications due to overlap between cluster regions). Cluster density was defined and calculated as the number of epitopes per unit length, and densities obtained were in the range of 0.11-1.56. Peptides located in high density (1.21-1.56) clusters were selected for further analysis. The 524 selected peptides were designated as Subset H (peptides selected from HotSpots).

[0287] Certain ASFV proteins are known immunogens and/or are involved in immune modulation and/or virulence in swine. Therefore, peptides 8-11 amino acids long derived from 17 such ASFV proteins (a total of 2,666 peptides) were assessed for allelic coverage. Peptides covering at least one of the five prevalent alleles and at least six of the 49 SLA alleles relevant to the Yorkshire, Landrace, and Duroc breed lines were selected for further characterization. These 750 peptides were denoted as Subset A (peptides selected from Antigens).

[0288] The final list of putative epitopes for experimental evaluation was compiled from the three subsets described above (subsets C, H, and A). After removal of redundancies (peptides common to two or more subsets, or redundant within a subset), the final list consisted of 2,272 unique peptides (FIG. 1).

[0289] Peptides can be synthesized using one or more synthetic chemical methods and/or can be obtained from intracellular synthesis using one or more recombinant techniques. In this example, peptides predicted to be immunogenic against ASFV are synthesized using a solid-phase method wherein the C-terminus of the first amino acid is coupled to an activated solid support, such as polyacrylamide. The carboxyl group of an incoming amino acid is coupled to the N-terminus of the growing amino acid chain (C-N synthesis). Step-wise synthesis adds amino acids one at a time to each peptide chain. Chemical groups are employed to block non-specific reactions during peptide synthesis. C-terminal carboxylic acids on incoming amino acids are activated using carbodiimides, and 1-hydroxybenzotriazole (HOBt) is used to reduce the risk of racemization during amino acid coupling. At the completion of the synthesis of a given peptide, protective groups are removed using acidolysis. Synthesized peptides are purified using reverse-phase chromatography, and >90% purity is established.

### Example 2

### Peptide Validation

[0290] This example describes an efficient in vitro method for screening putative peptides immunogenic against ASFV. The peptides described in this example are predicted using bioinformatics methods and then produced using chemical synthesis methods as described in Example 1. Using the in vitro selection process described in this example, the number of potential epitopes is reduced to allow further evaluation of a workable number of only the most promising candidates.

[0291] Synthesized peptides predicted to be immunogenic against ASFV are screened against peripheral blood lymphocytes in ELISpot assays, which allow detection (at a single-cell level) of interferon secretions from previously-exposed lymphocytes (lymphocytes collected from swine exposed to ASFV) in reaction to the peptides. Peripheral blood lymphocytes were collected from swine that had been previously challenged with low doses of attenuated ASFV China/2018/AnhuiXCGQ strain or had been exposed to live ASFV China/2018/AnhuiXCGQ. ASFV used to challenge the swine was propagated in primary porcine alveolar macrophages and quantified using qPCR and hemadsorption assays.

[0292] ELISpot assays to detect interferon-gamma (IFN-γ) were performed in microplates. Ready-to-use porcine IFN-γ ELISpot assay kits are commercially available from multiple suppliers. An antibody specific for porcine IFN-γ was pre-coated onto a PVDF-backed microplate. Lymphocytes (previously exposed to ASFV) stimulated with a given synthetic peptide were pipetted into the wells of the microplate, and IFN-γ secreted by the stimulated cells was captured by the immobilized antibodies in the immediate vicinity of each cell. Cells were removed from the wells by washing and the IFN-γ-bound, immobilized antibodies were incubated with a biotinylated detection antibody, followed by alkaline-phosphatase conjugated to streptavidin. A dark blue-to-black colored precipitate formed at each location in the wells where the immobilized antibodies had bound IFN-γ secreted by the stimulated cells. The resultant spots were counted using an automated plate reader designed for this purpose.

[0293] Analysis of ELISpot assay results for each of the peptides predicted to be immunogenic against ASFV identified a significantly smaller number of candidate peptides that each produce a strong immune response above specific thresholds set by this study. These candidates are considered the most promising peptides for further development of compositions to stimulate an immune response against ASFV in swine or to immunize swine against ASFV.

[0294] Two analyses were conducted in this study: a “full screen” that assessed all 2,272 of the bioinformatically-identified candidate peptides, and a “pool screen” conducted using pools of peptides containing eight or nine peptides per pool. The full screen was conducted using lymphocytes collected from two swine, denoted 9H (animal 9 from farm H) and 14S (animal 14 from farm S). The negative control (NC) background was used to calculate a permissive threshold and a strict threshold as follows:

[0295] Permissive threshold (PT) =average of medium+2* STDEV_P

[0296] Strict threshold (ST) =average of medium+5*STDEV_P

[0297] wherein “average of medium” denotes the average number of spots in wells with medium only, calculated for each swine plate separately, and “STDEV_P” denotes standard deviation based on the entire population. The threshold values calculated for each swine are shown in Table 4. “Positive” peptides (i.e., peptides with spot numbers above a threshold value) were considered the most promising peptides for further development and experimental analysis.

TABLE 4
Permissive and stringent threshold values (spot number) for each swine.

| | Permissive | Stringent |
|---|---|---|
| Swine | Threshold | Threshold |
| 10S | 10 | 18 |
| 14S | 12 | 20 |
| 2S | 17 | 28 |
| 3H | 15 | 23 |
| 5H | 13 | 18 |
| 6H | 12 | 20 |
| 7H | 14 | 20 |
| 7S | 2 | 3 |
| 8H | 13 | 19 |

[0298] Table 5 shows the number of positive peptides identified in the full screen of all 2,272 bioinformatically-identified peptides using lymphocytes collected from animals 14S and 9H. Positive peptides identified in the full screen, along with ELISpot assay results (number of spots counted for each peptide), are shown in Appendices II (animal 14S) and III (animal 9H). Thirteen positive peptides were identified above the permissive threshold as shared in both animal 14S and animal 9H, while 46 were unique to swine 9H and 198 were unique to swine 14S. No positive peptides above the stringent threshold were identified as shared; 14 were unique to swine 14S and seven were unique to swine 9H.

TABLE 5
Number of Positive Peptides Identified in the Full Screen

| | Number of Positive Peptides | |
|---|---|---|
| | Swine 14S | Swine 9H |
| | (PT = 12, | (PT = 16, |
| Threshold | ST = 20) | ST = 26) |
| Permissive (PT) | 211 | 59 |
| Stringent (ST) | 14 | 7 |

[0299] The first pool screen was conducted with pools of 8-9 peptides selected from the 2,272 peptides and used lymphocytes from 9 swine denoted 3H, 5H, 6H, 7H, 8H, 2S, 7S, 10S, 14S. This first pool screen identified 238 total “positive” peptide pools (i.e., peptide pools with spot numbers above the threshold value) above the permissive threshold and 128 above the stringent threshold. Table 6 shows the number of positive peptide pools (each containing eight or nine peptides) identified in each swine (threshold values are shown for each swine in Table 4).

TABLE 6
Number of Positive Peptide Pools Identified in
Each Swine Above Each Threshold.

| | Permissive | Stringent |
|---|---|---|
| Swine | Threshold | Threshold |
| 10S | 26 | 11 |
| 14S | 117 | 9 |
| 2S | 37 | 6 |
| 3H | 3 | 1 |
| 5H | 77 | 20 |
| 6H | 26 | 10 |
| 7H | 84 | 12 |
| 7S | 125 | 92 |
| 8H | 70 | 14 |

[0300] Table 7 shows the number of pools that were identified as positive in one or more animals.

TABLE 7
Number of Pools Identified as Positive in One or
More Animals Above Each Threshold.

| Number | Permissive | Stringent |
|---|---|---|
| of Swine | Threshold | Threshold |
| 8 | 1 | — |
| 7 | 2 | 1 |
| 6 | — | — |
| 5 | 12 | 1 |
| 4 | 20 | 1 |
| 3 | 63 | 6 |
| 2 | 74 | 22 |
| 1 | 66 | 97 |

[0301] Thirty-three of the 238 positive pools above the permissive threshold were selected for further analysis. Of these 33 pools, 22 were selected because they exhibited cross reactivity in at least five of eight selected pigs (3S, 5S, 14S, 6H, 7H, 2S, 7S and 10S), eight pools were selected because they exhibited cross reactivity in seven of the 15 total pigs screened, and three pools were selected because they each contained at least three individual peptides shown to react with pig 14S in the full screen. A total of 276 peptides from 33 positive pools were assessed individually via ELISpot screening, using concanavilin A (ConA) as a positive control (FIGS. 2 & 3). Of these 276 peptides, 201 were identified above the permissive threshold (Appendix IV), and of the 201 peptides, 125 were identified above the stringent threshold (FIG. 3, Appendix VIII). Further, 77 of the peptides identified above the stringent threshold produced greater than or equal to 20 spots in the ELISpot assays (FIG. 1, Appendix V). Of these 77 peptides, the 18 peptides that produced the most spots in the ELISpot assays were designated “top” peptides (FIG. 1, Appendix VI).

### Example 3

### Immunogenic Construct Assembly and Expression

[0302] This example describes the assembly and expression of amino acid constructs comprising one or more peptides of SEQ ID NOs. 2-2273, one or more “domains” as defined in this Example below, and/or one or more full- or partial-length amino acid sequences encoding one or more ASFV immunogenic proteins.

[0303] As described in Example 2, 77 peptides identified above the stringent threshold in ELISpot assays produced greater than or equal to 20 spots per well (FIG. 1, Appendix V). These 77 peptides were mapped to their locations within ASFV proteins (Appendices V-VI). Forty-four of the 77 peptides were clustered (Appendix VII) within the following seven ASFV proteins having GenBank Accession Nos.: AYW34011.1 (A238L, containing I⁻KB-like ankyrin repeats; FIG. 4; SEQ ID NOs. 2366-2367), AYW34004.1 (A224L, IAP-like protein p27; FIG. 5; SEQ ID NOs: 2368-2369), AYW34001.1 (MGF_505-7R; FIG. 6; SEQ ID NOs. 2370-2371), AYW34010.1 (MGF_360-15R; FIG. 7; SEQ ID NOs. 2372-2373), AYW34052.1 (zinc finger protein B385R; FIG. 8; SEQ ID NOs. 2374-2375), AYW34002.1 (MGF_505-9R; FIG. 9; SEQ ID NOs. 2376-2377), and AYW33963.1 (MGF_110-3L; FIG. 10; SEQ ID NOs. 2378-2379). “Domains” in this Example are regions of peptide clustering (also known as “hotspots”) within the seven ASFV proteins.

[0304] Various combinations of one or more peptides selected from Appendix VII, one or more ASFV domains (“hotspots” as shown in SEQ ID NOs. 2331-2335), and/or one or more full- and/or partial-length ASFV immunogenic proteins (as shown in SEQ ID Nos. 2323-2329 and/or nucleic acids of SEQ ID NOs. 2339-2345) were assembled into the expression constructs of SEQ ID NOs. 2310-2330. Each construct included a histidine tag (His-tag) at the C-terminus to detect expression via western blot analysis, and an N-terminus linker sequence (GSSG) and HiBiT sequence (GSGWRLFKKLS) for expression detection in lysate. Certain constructs comprising peptides also include spacer sequences (GPGPG or AAY) between individual peptide sequences. Constructs comprising peptide sequences selected from the 44 peptides found to cluster within the seven ASFV proteins (Appendix VII), also included HLT, Sumo, or maltose binding protein (MBP) sequences at the N-terminus in order to support expression. Exemplary Sumo and MBP sequences are provided in SEQ ID NOs. 2336 (corresponding to and 2337 (corresponding to NP_418458.1, which is incorporated by reference herein), respectively. For constructs with a MBP fusion protein, MBP was synthetically cloned into the twist vector using the MBP sequence from the pMAL-c2 vector. For constructs with a Sumo fusion protein, Sumo was synthetically cloned into the twist vector using the Sumo sequence from the Champion pET SUMO vector (Thermofisher). The HLT protein is the lipoyl domain from Bacillus Stearothermophilus E2p (SEQ ID NO. 2338), along with an N-terminus His-tag and an optimized Tobacco Etch Virus (TEV) protease cleavage site. Additional information about the lipoyl domain from B. Stearothermophilus E2p (SEQ ID NO. 2338) can be found in Packman et al., Amino acid sequence analysis of the lipoyl and peripheral subunit-binding domains in the lipoate acetyltransferase component of the pyruvate dehydrogenase complex from Bacillus stearothermophilus, Biochem. 1, 1988, 252:79-86, which is incorporated by reference in its entirety herein. Additional information concerning the HLT fusion protein and similar fusion proteins that can enhance solubility of proteins that include natively disordered regions can be found in Lebediker & Danieli, Production of prone-to-aggregate proteins, FEBS Letters, 2014, 588(2):236-246, which is incorporated by reference in its entirety herein. Constructs 55 and 56 were purchased in a twist cloning vector for use in a pseudorabies virus vector.

[0305] Each construct was expressed in E. coli at 22° C. and 37° C. For each construct independently, polyethylene glycol (PEG) competent E. coli cells were transformed using a heat shock method. Briefly, 100 μL of competent cells was transferred to tubes on ice. A plasmid comprising a given construct was added to a tube and the mixture was incubated at 4° C. on ice, followed by 45 seconds at 42° C., and 2 minutes on ice. Room temperature SOC medium (0.9 mL) was added to the tube, which was then incubated in a shaker at 37° C. for between one hour and 90 minutes. Transformed cells were then plated (100 μL per plate. Plates can contain appropriate selection antibiotics depending on the vector used.

[0306] While cell growth at 22° C. promotes soluble expression such that expression products can be collected from culture supernatants, growth at 37° C. promotes expression of the constructs in inclusion bodies, which can be collected as a component of the cell pellet. Levels of expression for each construct were assessed by isolating proteins from culture supernatants and from pelleted cells. Briefly, proteins in inclusion bodies were isolated from cells using the following protocol: Cell pellets were washed first with Triton X-100, second with Triton X-114, third with 1% CHAPS reagent, and fourth with 6 molar urea. Pellets were then frozen and stored at -80° C. prior to use.

[0307] Proteins collected from culture supernatants and cell pellets were assessed using Coomassie Blue staining and immunoblotting. Proteins were separated using polyacrylamide gel electrophoresis. After gels were stained with Coomassie Blue and imaged, proteins were transferred onto PVDF membranes and detected via western blotting using anti-His antibodies. FIGS. 11-34 show gel staining and western blotting results for each of 54 constructs expressed in E. coli at either 22° C. (FIG. 11-21) or 37° C. (FIGS. 22-34), along with the expected molecular weight and specific one or more tags for each construct. Sequences of constructs labeled 1-54 are provided in SEQ ID NOs. 2310-2330. While constructs 1-54 each included an N-terminal His-tag for detection purposes, certain constructs also included at least one fusion protein attached directly to the N-terminus of the construct sequence, such as HLT, Sumo, or MBP. For constructs including a fusion protein, the His-tag was attached to the N-terminus of the fusion protein. Constructs as tested in this Example included the following fusion proteins: Construct 1: HLT; 2: Sumo; 3: HLT; 4: Sumo; 5: HLT; 6: Sumo; 7: HLT; 8: Sumo; 9: HLT; 10: Sumo; 11: no fusion protein; 12: HLT; 13: Sumo; 14: MBP; 15: no fusion protein; 16: HLT; 17: Sumo; 18: MBP; 19: no fusion protein; 20: HLT; 21: Sumo; 22: MBP; 23: no fusion protein; 24: HLT; 25: Sumo; 26: MBP; 27: no fusion protein; 28: HLT; 29: Sumo; 30: MBP; 31: no fusion protein; 32: HLT; 33: Sumo; 34: MBP; 35: no fusion protein; 36: HLT; 37: Sumo; 38: no fusion protein; 39: HLT; 40: Sumo; 41-47: HLT; 48-54: Sumo.

[0308] In each of FIGS. 11-34 showing Coomassie blue stained gels and/or western blots, “M” shows the marker lane denoting band molecular weights, “S” represents proteins collected from cell culture supernatants, and “P” represents proteins collected from cell pellets.

[0309] Table 8 provides a summary of the expression findings for each of the 54 constructs assessed. Column 2 of Table 8 describes where (in the cell pellet or in the culture supernatant/soluble fraction) a given expressed construct was detected. Western blotting detected protein products resulting from construct expression in E. coli primarily in cell pellets. Proteins were detected in culture supernatants for constructs 41-47, although at lower levels than in cell pellets for the same constructs. Construct 1, 3, 6, 9, 10, 11, 13, 16, 24, 27, 28, and 31 showed strong expression and were selected for further optimization. These constructs were again assessed for expression in E. coli, this time in two types of media, autoinduced media (AI) and Terrific Broth (TB). The “Constructs for optimization” column in Table 8 provides a qualitative assessment of expression (strong expression or weak expression) for each assessed construct, along with the optimal media (AI and/or TB) for expression of that construct in E. coli. Constructs were further selected for in vivo verification studies based on strong expression in the media optimization study. Because certain constructs differed only in their fusion proteins (MBP, Sump, or HLT), for a given group of constructs that otherwise shared sequence identity, only one fusion protein per construct was selected for the verification studies.

TABLE 8
Construct Expression Results

| | Expression (at 37° C. | | |
|---|---|---|---|
| | for constructs 1-40, | | Constructs |
| Construct | and at 22° C. or lower | Constructs for | for |
| no. | for constructs 41-54) | optimization | purification |
| 1 | Pellet | Strong expression | Verified |
| | | IB (AI) | |
| 2 | Pellet | | |
| 3 | Pellet | Strong expression | Verified |
| | | IB (AI) | |
| 4 | Pellet | | |
| 5 | Pellet | | |
| 6 | Pellet | Strong expression | Verified |
| | | IB (AI) | |
| 7 | Pellet | | |
| 8 | Pellet | | |
| 9 | Pellet | Strong expression | Verified |
| | | IB (AI) | |
| 10 | Pellet | Strong expression | ? |
| | | IB (AI) | |
| 11 | Pellet | Weak expression IB | |
| 12 | Pellet | | |
| 13 | Pellet | Strong expression | Verified |
| | | IB (AI) | |
| 14 | Pellet | | |
| 15 | Pellet | | |
| 16 | Pellet | Strong expression | Verified |
| | | IB (AI/TB) | |
| 17 | Pellet | | |
| 18 | Pellet | | |
| 19 | no expression | | |
| 20 | no expression | | |
| 21 | no expression | | |
| 22 | no expression | | |
| 23 | no expression | | |
| 24 | Pellet | Weak expression IB | |
| 25 | Pellet | | |
| 26 | Pellet | | |
| 27 | Pellet | Strong expression | Verified |
| | | IB (AI) | |
| 28 | Pellet | Strong expression | ? |
| | | IB (AI) | |
| 29 | Pellet | | |
| 30 | no expression | | |
| 31 | Pellet | Weak expression IB | |
| 32 | no expression | | |
| 33 | no expression | | |
| 34 | no expression | | |
| 35 | no expression | | |
| 36 | no expression | | |
| 37 | no expression | | |
| 38 | no expression | | |
| 39 | no expression | | |
| 40 | not tested? | | |
| 41 | Pellet (can be soluble) | | |
| 42 | Pellet (can be soluble) | | |
| 43 | Pellet (can be soluble) | | |
| 44 | Pellet (can be soluble) | | |
| 45 | Pellet (can be soluble) | | |
| 46 | Pellet (can be soluble) | | |
| 47 | Pellet (can be soluble) | | |
| 48 | Pellet | | |
| 49 | Pellet | | |
| 50 | Pellet | | |
| 51 | Pellet | | |
| 52 | Pellet | | |
| 53 | Pellet | | |
| 54 | Pellet | | |

(IB: inclusion bodies; AI: autoinduced media; TB: Terrific Broth)

### Example 4

### Composition Administration and Analysis In Vivo

[0310] This example describes in vivo validation studies aimed at assessing the ability of one or more compositions comprising a viral vector expressing one or more peptides of SEQ ID NOs. 2-2273 and/or one or more constructs of SEQ ID NOs. 2310-2330 to induce an immune response against ASFV in swine and to immunize (vaccinate) swine against ASFV.

[0311] The peptides expressed by the selected vector, a pseudorabies viral vector in this example, are selected from (1) SEQ ID NOs. 2-2273 based on the ability of the peptides to produce an immune response above a specified threshold as measured in porcine peripheral blood lymphocytes using an ELISpot assay as described in Example 2, and/or (2) SEQ ID NOs. 2310-2330 based on level of expression as described in Example 3.

[0312] The ten most promising candidate peptides are selected based on ELISpot assay results. Pseudorabies viral vectors are produced that express each peptide individually, and vaccine compositions comprising these vectors are also produced. In initial testing in swine, some of the ten compositions induce adequate humoral immune responses, as measured by liquid phase blocking ELISAs. A new pseudorabies viral vector is then produced that expresses each of the peptides of the compositions that induced the adequate humoral immune responses. Two compositions comprising the new vector are produced: one adjuvanted and one unadjuvanted, but otherwise comprising the same components.

[0313] Similarly, the five most promising candidate constructs of SEQ ID NOs. 2310-2330, are selected based on expression analyses, along with constructs 55 and 56. Pseudorabies viral vectors are produced that express each construct individually, and compositions comprising the new vectors are produced: one adjuvanted and one unadjuvanted, but otherwise comprising the same components.

[0314] The ability of the compositions to stimulate an immune response in swine and to provide protection against ASFV challenge is evaluated. For each viral vector produced, two groups of swine are vaccinated intramuscularly or intranasally. The first group receives the unadjuvanted composition comprising the viral vector and the second group receives the adjuvanted composition comprising the viral vector. One subset of vaccinated swine from each group is administered a second dose of the same composition at some interval following initial dosing, such as 28 days post (initial) vaccination (dpv). A second subset of vaccinated swine is administered a second dose at a different interval following initial dosing, such as 180 dpv. A third subset of vaccinated swine is administered a second dose at 28 dpv and a third dose 180 dpv. To assess the immune responses of treated swine, serum samples are collected from the swine prior to vaccination (day 0), as well as 4, 7, 14, 28, 56, 180, 208, 270, and 298 days following the first administration. Additionally, to study maternally-derived antibody (MDA) titers, serum samples are collected from piglets at 21 and 42 days of age that are born from vaccinated sows.

[0315] A subset of vaccinated swine from each group is challenged 50 days after the first vaccine administration using the ASFV China/2018/AnhuiXCGQ strain propagated in primary porcine alveolar macrophages and quantified using qPCR and hemadsorption assays. Serum samples are collected from challenged swine on the same schedule as for non-challenged (vaccinated only) swine.

[0316] Serum samples from all animals in this study are analyzed using liquid phase blocking ELISA for the detection of peptide-specific antibodies. IFN-γ is detectable in serum beginning 4 dpv. Swine vaccinated on days 0, 28, and 180 show the highest peptide-specific antibody titers 298 dpv, while the antibodies are undetectable by day 270 in swine administered the vaccine only once (on day 0). Swine administered the adjuvanted vaccine have higher peptide-specific antibody titers than swine administered the unadjuvanted vaccine. While piglets born from immunized sows show high passive antibody titers on day 21, titers have declined by day 42, suggesting that piglets born from immunize sows should receive boosters by about two months of age. In challenged animals, the ASFV genome and infectious virus are detectable at days 5 and 10 following challenge. Control (unvaccinated) pigs develop signs of acute ASF, while vaccinated animals develop no or only mild symptoms. The ASFV genome is detectable 60 days following challenge in vaccinated swine, although levels have declined significantly by day 60. Infectious virus is undetectable in challenged swine by day 35 following challenge. All vaccinated animals tolerate the compositions well, and no negative side effects attributable to the compositions are observed. The results of this study support the use of a viral vector expressing one or more ASFV-specific peptides in the development of a vaccine to protect swine against ASFV infection.

### Example 5

### Composition Administration and Analysis In Vivo

[0317] This example describes in vivo validation studies that were used to assess the ability of one or more compositions comprising a viral vector expressing one or more of the peptides of Appendix V and/or one or more of the peptides of Appendix VI to induce an immune response against ASFV in swine and to immunize swine against ASFV.

[0318] Peptides were chemically synthesized for use in this trial. The main objective of this trial was to evaluate cellular immune response following prime-boost vaccination using compositions comprising synthetic peptides with different adjuvants. Further, animal CD8 responses were evaluated, and animal immune responses using several approved adjuvants were compared.

### 1. Study Design

[0319] 1. Three pregnant female pigs were located in the animal facility in separated cages. Approximately 30 newborn piglets were farrowed within the facility.

[0320] 2. Three days post farrowing, piglets were administered with iron injection (for example, Ferraject 200, Eurovet Animal Health) in the right leg per each piglet.

[0321] 3. Two weeks post farrowing, piglets were weighed, and the highest-weighted piglets were chosen for the experiment. Piglets will be divided into 5 groups, 3 piglets per group, with each group having 1 piglet from each mother to increase the breed variability.

[0322] 4. Three weeks post farrowing. blood was collected from three piglets, which piglets were not included in the trial for ELISpot optimization.

[0323] 5. Twelve (12) ear marked pigs 4 weeks old were vaccinated with the following vaccines.

[0324] Group 1: Three (3) pigs each were vaccinated with a composition comprising the 77 peptides of Appendix V in Emusigen P intramuscularly in the left leg, and with a composition comprising the 77 peptides of Appendix V in Carbigen+c-di-GMP intranasally.

[0325] Group 2: Three (3) pigs each were vaccinated with a composition comprising the 18 peptides of Appendix VI in Emusigen P intramuscularly in the left leg, and with a composition comprising the 18 peptides of Appendix VI in Carbigen+c-di-GMP intranasally.

[0326] Group 3: Three (3) pigs each were vaccinated with a composition comprising the 77 peptides of Appendix V in ISA 201+Quil-A+R848+TDB intramuscularly in the left leg, and with a composition comprising the 77 peptides of Appendix V in Carbigen+c-di-GMP+poly (I:C) intranasally.

[0327] Group 4: Three (3) pigs each were vaccinated with a composition comprising the 18 peptides of Appendix VI in ISA 201+Quil-A+R848+TDB intramuscularly in the left leg, and with a composition comprising the 18 peptides of Appendix VI in Carbigen+c-di-GMP+poly (I:C) intranasally.

[0328] Group 5 (Control pigs): Two (2) pigs were used as non-vaccinated controls.

TABLE 9
Trial groups

| Group | Formula | Route | Peptide mixture | # of pigs |
|---|---|---|---|---|
| 1 | Emulsigen P | Intra-muscular | 77 peptides | 3 |
| | Carbigen + c-di-GMP + | Intra-nasal | | |
| | poly (I:C) | | | |
| 2 | Emulsigen P | Intra-muscular | 18 peptides | 3 |
| | Carbigen + c-di-GMP + | Intra-nasal | | |
| | poly (I:C) | | | |
| 3 | ISA 201 + Quil-A + | Intra-muscular | 77 peptides | 3 |
| | R848 + TDB | | | |
| | Carbigen + c-di-GMP + | Intra-nasal | | |
| | poly (I:C) | | | |
| 4 | ISA 201 + Quil-A + | Intra-muscular | 18 peptides | 3 |
| | R848 + TDB | | | |
| | Carbigen + c-di-GMP + | Intra-nasal | | |
| | poly (I:C) | | | |
| 5 | Non injected group | Not applicable | Not applicable | 2 |

[0329] 6. The second vaccination (boost) was given at 3 weeks following the first vaccination (same dosage per pig). Whole blood samples were collected during the trial at 34, 35, 55, 56, 62, and 63 days post first vaccination. Collection on days 62 and 63 is optional and was conducted as needed.

[0330] 7. All bleedings were done into CPT tubes in 8 mL whole blood per tube. Three CPT tubes for groups 1 and group 3. Two CPT tubes for groups 2, 4 and 5.

TABLE 10
Trial Timeline

| Age | | | | | | | | | |
|---|---|---|---|---|---|---|---|---|---|
| (Weeks) | 3 W | 4 W | 7 W | 9 W | | 12 W | | 13 W (Optional) | |
| Trial | −1 | 1 | 21 | 34 | 35 | 55 | 56 | 62 | 63 |
| (Days) | | | | | | | | | |
| Activity 1 | | V | V | | | | | | |
| Activity 2 | *B | | | B | B | B | B | B | B |
| | 3 | | | Groups | Groups | Groups | Groups | Groups | Groups |
| | pigs | | | 1 + 3 | 2 + 4 + 5 | 1 + 3 | 2 + 4 + 5 | 1 + 3 | 2 + 4 + 5 |
| Activity 3 | | | | | | | E | | E |

Activity 1: V = vaccination
Activity 2: B = bleeding
Activity 3: E = Euthanasia
*Whole blood was taken from 3 pigs, which pigs were not included in the trial groups.

TABLE 11
Trial events

| Trial day | Action |
|---|---|
| −1 | Bleeding for ELISpot optimization from 3 |
| | piglets that were not included in the trial |
| 0 | 1^{st} vaccination (Prime) |
| 21 | 2^{nd} vaccination (Boost) |
| 34, 35, 55, 56 and 62 | Bleedings for PBMC isolation |
| (Optional), 63 (Optional) | |
| 63 | Completion (Pigs euthanize) |

### 2. Study Animals—Animal Selection and Identification

[0331] Three pregnant female pigs were located in the animal facility in separated cages. Approximately 30 newborn piglets were calved within the facility. Three days after calving, each piglet was administered with iron injection in the right leg. Fourteen (14) ear marked pigs 3 weeks old were vaccinated as shown in Table 9.

### 3. Materials

[0332] 3.1 Adjuvants:

[0333] MONTANIDE ISA 201 VG: is a mineral oil-based adjuvant which has been developed for the formulation of Water-in-Oil-in-Water (W/O/W) emulsions. It is based on a specific enriched light mineral oil and a highly refined emulsifier obtained from mannitol and purified oleic acid from vegetable origin. MONTANIDE ISA 201 VG is free of animal origin ingredients. Vaccine formulations with MONTANIDE ISA 201 VG induce short- and long-term immunity. Compared to traditional double emulsions, MONTANIDE ISA 201 VG emulsions are stable, with low viscosity and are easy to inject.

[0334] Vaccine preparation:

[0335] To prepare 100 g of vaccine with a one-step process:

[0336] 1. MONTANIDE ISA 201 VG 50 g

[0337] 2. Aqueous antigenic medium 50 g

[0338] For preparation in volume, MONTANIDE ISA 201 VG density is about 0.83 at 20° C.

[0339] Each phase is heated to 31° C. before mixing. Stable preparations are obtained by mixing the aqueous medium into MONTANIDE ISA 201 VG under a low shear agitation (to maintain temperature above 30° C.). After formulation, emulsions are cooled down.

[0340] CARBIGEN™ and POLYGEN™ (Carbigen) are MVP's polymer-type adjuvants. Because of its muco-adhesive properties, CARBIGEN is particularly applicable for presenting inactivated antigens to mucosal membranes (e.g., intranasal). Intranasal vaccines incorporating inactivated antigens with CARBIGEN have been used successfully in horses, pigs, and small animals. It has also shown exceptional performance in adjuvanting PCV2 antigens.

[0341] Instruction for use:

[0342] 1. With acid stable antigens, add 1-10% v/v of CARBIGEN to the antigen, mix well for 1-8 hours and raise pH carefully to approximately 7.0 with lON ^{NaOH.*} Mix an additional 12-24 hours. If necessary, readjust pH to between 6.8 and 7.2.

[0343] 2. With acid labile antigens, add 10% v/v of CARBIGEN to a vessel equipped with a mixer. Adjust the pH of the CARBIGEN using lON NaOH to as low a pH as the antigen will tolerate without damage. * The lower the pH that the antigen can tolerate, the better will be the adjuvanting characteristics. When adjuvant is adjusted to the proper pH, add about 10% of the total antigen volume and mix for at least 30 minutes. The pH may drop. Readjust the pH and add the remainder of the antigen. Adjust the final pH to between 6.8 and 7.2. Mix at least an additional 12 hours (overnight) and readjust the pH, if necessary. Recheck the pH prior to filling. A small amount of NaCl or PBS may also be added to the antigen or to the CARBIGEN to reduce viscosity.

[0344] * Caution: Do not to raise the pH above 7.5. Addition of HCl or other acids to bring pH down, if too much NaOH is added, may decrease the effectiveness of the adjuvant.

[0345] EMULSIGEN®, MVP product, was used in the first vaccine that contained an oil-in-water adjuvant that was approved by USDA for both intramuscular and subcutaneous injection of pigs. Since that approval in 1982, it has been used globally in 45 countries and has a proven track record of being consistently safe and effective in all species of animals.

[0346] Instruction for use:

[0347] 1. For most antigens, we recommend that EMULSIGEN-P be used at 10% to 20% (v/v).

[0348] 2. EMULSIGEN-P should be gently mixed for up to 2 hours before adding to the antigen. During addition to the antigen, it is recommended that gentle mixing using standard equipment (e.g. Lightning mixer or magnetic stirrers) be continued for from 2-24 hours.

[0349] 3. Continue gently mixing the product throughout filling to assure consistency.

[0350] 4. Products containing EMULSIGEN-P may be administered intramuscularly or subcutaneously in a wide variety of animals.

[0351] 5. It is normal for final vaccines to develop a creaming layer on top during storage. This does not adversely affect the antigenicity or immunogenicity. Simple inversion of the vials prior to injection is adequate to remix all components.

[0352] Quil-A adjuvant is a saponin adjuvant produced by GMP by Brenntag Biosector, a leader in the global vaccine adjuvants market, and purified by them through a proprietary process that ensures consistency and immunostimulatory potential. Quil-A adjuvant is used in a wide variety of veterinary vaccines, as well as in immunological research into human and veterinary applications. Quil-A adjuvant contains the water-extractable fraction of saponins from the South American tree, Quillaja saponaria Molina.

[0353] Preparation of Stock Solution (10 mg/ml)

[0354] 1. Weigh 100 mg of Quil-A adjuvant. Place in a clean container. 2. Add 10 ml of distilled water to 100 mg of Quil-A adjuvant. 3. Mix using a magnetic stirrer until all the material has dissolved.

[0355] 4. Immediately after dissolving the lyophilized powder, pass it through a 0.22-micron sterility filter into a sterile container under laminar air flow (Class A) in Class B surroundings.

[0356] 5. After sterile filtration the Quil-A adjuvant solution should be stored frozen until use. Prepare aliquots to avoid repeated freeze-thaw cycles.

[0357] 6. Due to the risk of alkaline hydrolysis, do not expose Quil-A adjuvant to a pH above 8.5.

[0358] TDB: Trehalose-6,6-dibehenate (TDB) is a non-toxic synthetic analogue of the mycobacterial cell wall component trehalose 6,6′ dimycolate (TDM, also known as cord factor).

### Preparation of Stock Suspension (1mg/mL)

[0359] 1. Add 1004, DMSO to 1mg TBD VacciGrade, heat at 60° C. (approx.15-30 seconds) and vortex.

[0360] 2. Once resuspended, immediately add 9004, sterile physiological water (provided) or phosphate buffered saline (PBS without Ca2+and Mg2+), heat for 10-15 minutes at 60° C. and homogenize by vortexing for 30 seconds.

[0361] 3. Store at 4 ° C. or prepare dilutions using buffered solution for immediate use. Resuspended product can be stored at 4 ° C. for 6 months. Prior to each use, bring suspension to room temperature and homogenize by vortexing for 30 seconds.

[0362] R848 (resiquimod): a small molecular weight imidazoquinoline compound, is an immune response modifier with potent antiviral and antitumor activities. R848 is being evaluated as an adjuvant in FDA-approved clinical vaccine trials.

### Preparation of Sterile Stock Solution (1 mg/mL)

[0363] 1. Add 5 mL endotoxin-free physiological water to the 5 mg R848 VacciGrade vial to obtain a solution at 1 mg/mL.

[0364] 2. Mix the solution by pipetting up and down.

[0365] c-di-GMP: Cyclic diguanylate monophosphate (c-di-GMP) is an intracellular signaling molecule produced by bacteria. Administration of c-di-GMP can induce a strong immune response in vitro and in vivo.

### Preparation of Sterile Stock Solution (1 mg/mL)

[0366] 1. Add 1 mL endotoxin-free physiological water to the 1 mg c-di-GMP VacciGrade vial to obtain a solution at 1 mg/mL.

[0367] 2. Mix the solution by pipetting up and down.

[0368] Poly (I:C) HMW: Polyinosinic-polycytidylic acid is a synthetic analog of double stranded RNA (dsRNA), a molecular pattern associated with viral infection. Both natural and synthetic dsRNA are known to induce type 1 interferon (INF) and other cytokines production. Poly (I:C) is recognized by TLR3.

[0369] Preparation of Sterile Stock Solution (1 mg/mL)

[0370] 1. Add 10 mL endotoxin-free physiological water to the 10 mg Poly (I:C) vial to obtain a solution at 1 mg/mL.

[0371] 2. Mix the solution by pipetting up and down.

[0372] 3. Heat the mixture for 10 minutes at 65-70° C. Allow the solution to cool for 1 hour at room temperature to ensure proper annealing.

[0373] 3.2 Peptides:

[0374] 77 ASFV positive peptides identified through ELISpot screenings were chemically synthesized to at least 70% purity by JPT (Berlin). Among these 77 positive peptides (each of which produced greater than or equal to 20 spots in the ELISpot assays), 18 peptides were defined as “top” positives with respect to their ELISpot scores (FIGS. 1-3). In this trial, two peptide mixtures were tested: the first mixture contained all 77 peptides; the second mixture contained only the 18 “top” peptides.

[0375] The stock solution for each peptide was produced at a concentration of 5 mg/mL. Every peptide was dissolved in 1 mL water for injection, except peptide 554, which was dissolved in 100 DMSO plus 900 μL water for injection. Two stock plates were prepared and frozen at −70° C. until vaccine preparation. The work was done in sterile conditions.

### 4. Vaccine Preparations:

[0376] During the study vaccination was performed twice per Group (see Tables 10 and 11 for vaccination time points) according to the vaccination instruction per each group. In addition, the vaccine preparation instructions are described per each vaccination event.

### Group 1-77 Peptides in Emulsigen P Vaccine

[0377] Intramuscular vaccine: 125 μg of each peptide was mixed with Emulsigen P adjuvant for a total volume of 5 mL (5 doses). The final dose contained 25 μg from each peptide in an injection volume of 1 mL. 1 mL of the vaccine was injected into each pig's left leg.

TABLE 12
Group 1-Vaccine Preparation (intramuscular dose)

| | | Concentration | Stock | Volume |
|---|---|---|---|---|
| IM vaccine | Substance | per dose | solution | (mL) |
| 1 | 77xPeptide | 25 μg (each) | 5 mg/mL | 25 μL (each) |
| | | | | 1.925 mL |
| | | | | (Total) |
| 2 | Emulsigen P | 12% (v/v) | Ready to use | 0.6 |
| 3 | PBS without | NA | Ready to use | 2.475 |
| | Ca and Mg | | (x1) | |
| Final vol. | | | | 5 |
| (mL) | | | | |

### Group 2-18 Peptides in Emulsigen P Vaccine

[0378] Intramuscular vaccine: 125 μg of each peptide was mixed with Emulsigen P adjuvant for a total volume of 5 mL (5 doses). The final dose contained 25 μg of each peptide in an injection volume of 1 mL. 1 mL of the vaccine was injected into each pig's left leg.

TABLE 13
Group 2-Vaccine Preparation (intramuscular dose)

| IM | | Concentration | Stock | Volume |
|---|---|---|---|---|
| vaccine | Substance | per dose | solution | (mL) |
| 1 | 18xPeptide | 25 μg | 5 mg/mL | 25 μL (each) |
| | | | | 0.45 mL |
| | | | | (Total) |
| 2 | Emulsigen P | 12% (v/v) | Ready to use | 0.6 |
| 3 | PBS without Ca | NA | Ready to use | 3.95 |
| | and Mg | | (x1) | |
| Final vol. | | | | 5 |
| (mL) | | | | |

### Group 3-77 Peptides in ISA 201 Plus Quil-A Plus R848 Plus TDB Vaccine

[0379] Intramuscular vaccine: 125 μg of each peptide were mixed with ISA 201 (50%, w/w), 150 μg Quil-A, 50 μg R848, and 50 μg TDB for a total volume of 5 mL (5 doses). The final dose contained 25 μg from each peptide in an injection volume of 1 mL. 1 mL of the vaccine was injected into each pig's left leg.

TABLE 14
Group 3 Vaccine Preparation (intramuscular dose)

| | | Concentration | Stock | Volume |
|---|---|---|---|---|
| IM vaccine | Substance | per dose | solution | (mL) |
| 1 | 77xPeptide | 25 μg | 5 mg/mL | 25 μL (each) |
| | | | | 1.925 mL |
| | | | | (Total) |
| 2 | ISA 201 | 50/50 (w/w) | Ready to use | 2.5 |
| 3 | Ouil-A | 150 μg | 10 mg/mL | 0.075 |
| 4 | R848 | 50 μg | 1 mg/mL | 0.25 |
| 5 | TDB | 50 μg | 1 mg/mL | 0.25 |
| Final vol. (mL) | | | | 5 |

### Group 4-18 peptides in ISA 201 Plus Quil-A Plus R848 plus TDB vaccine

[0380] Intramuscular vaccine: 125 μg of each peptide was mixed with ISA 201 (50%, w/w), 150 Quil-A, 50 μg R848, and 50 μg TDB for a total volume of 5 mL (5 doses). The final dose contained 25 μg of each peptide in an injection volume of 1 mL. 1 mL of the vaccine was injected into each pig's left leg.

TABLE 15
Group 4 Vaccine Preparation (intramuscular dose)

| | | Concentration | Stock | Volume |
|---|---|---|---|---|
| IM vaccine | Substance | per dose | Solution | (mL) |
| 1 | 18xPeptide | 25 μg | 5 mg/mL | 25 μL (each) |
| | | | | 0.45 mL |
| | | | | (Total) |
| 2 | ISA 201 | 50/50 (w/w) | Ready to use | 2.5 |
| 3 | Ouil-A | 150 μg | 10 mg/mL | 0.075 |
| 4 | R848 | 50 μg | 1 mg/mL | 0.25 |
| 5 | TDB | 50 μg | 1 mg/mL | 0.25 |
| 6 | PBS without | NA | Ready to use | 1.475 |
| | Ca and Mg | | (x1) | |
| Final vol. | | | | 5 |
| (mL) | | | | |

### Groups 1 and 3-77 Peptides in Carbigen Plus C-Di-GMP Vaccine

[0381] Intranasal vaccine: 120 μg of each peptide was mixed with 10% (v/v) Carbigen, 50 μg c-di-GMP, and 50 μg poly (I:C) for a total volume of 8 mL (8 doses). The final dose contained 15 μg of each peptide in an injection volume of 1 mL. 0.5 mL of the vaccine was administered into each pig's nostril (for a total of 1.0 mL per pig) using MAD Nasal Drug Delivery Device (Teleflex).

TABLE 16
Groups 1 and 3 Vaccine Preparation (intranasal dose)

| Intranasal (IN) | | Concentration | Stock | Volume |
|---|---|---|---|---|
| vaccine | Substance | per dose | solution | (mL) |
| 1 | 77xPeptide | 15 μg | 5 mg/mL | 24 μL (each) |
| | | | | 1.848 mL |
| | | | | (Total) |
| 2 | Carbigen | 10% (v/v) | Ready to use | 0.8 |
| 3 | c-di-GMP | 50 μg | 1 mg/mL | 0.4 |
| 4 | Poly (I:C) | 50 μg | 1 mg/mL | 0.4 |
| 5 | PBS without | NA | Ready to use | 4.552 |
| | Ca and Mg | | (x1) | |
| Final vol. (mL) | | | | 8 |

### Groups 2 and 4-18 Peptides in Carbigen Plus c-di-GMP Vaccine

[0382] Intranasal vaccine: 120 μg of each peptide was mixed with 10% (v/v) Carbigen, 50 μg c-di-GMP, and 50 μg poly (I:C) for a total volume of 8 mL (8 doses). The final dose contained 15 μg of each peptide in an injection volume of 1 mL. 0.5 mL of the vaccine was administered into each pig's nostril using MAD Nasal Drug Delivery Device (Teleflex).

TABLE 17
Groups 2 and 4 Vaccine Preparation (intranasal dose)

| IN | | Concentration | | Stock | | Volume | |
|---|---|---|---|---|---|---|---|
| vaccine | Substance | per dose | | Solution | | (mL) | |
| 1 | 18xPeptide | 15 | μg | 5 | mg/mL | 24 | μL |

(each)

| | |
|---|---|
| 0.432 | mL |

| | | | | | | (Total) |
|---|---|---|---|---|---|---|
| 2 | Carbigen | 10% (v/v) | | Ready to use | | 0.8 |
| 3 | c-di-GMP | 50 | μg | 1 | mg/mL | 0.4 |
| 4 | Poly I:C | 50 | μg | 1 | mg/mL | 0.4 |

| | | | | |
|---|---|---|---|---|
| 5 | PBS without | NA | Ready to use | 5.968 |
| | Ca and Mg | | (x1) | |
| Final vol. | | | | 8 |
| (mL) | | | | |

5. Bleeding procedure:

[0383] Whole blood (8 mL) was collected into CPT tubes from animals from groups 1-4 at the bleeding time points (post vaccination) shown in Table 10.

[0384] 1. Work was performed under aseptic conditions as much as possible. Prepare: Alcohol 70%, gauzes, Vacutainer (20G), CPT tubes (Vol: 8 mL) at room temperature.

[0385] 2. Restrain animal with snare, securely contained against a wall or corner; alternatively, swine can be placed in a sling, smaller pigs can be held or placed in v-trough.

[0386] 3. Clean as needed to remove superficial dirt and debris. Locate jugular furrow and align with point of the shoulder and point of the manubrium. With bevel up, insert needle perpendicular to the skin.

[0387] 4. If using vacutainer, once needle inserted, stabilize needle and push the vacutainer tube into hub. If you have hit the vein, blood will flow freely into tube. Multiple tubes can be filled by removing filled tube and replacing with fresh tube.

[0388] 5. If you have missed the vein, you can carefully reposition needle, with vacutainer attached, until vessel penetrated. The vessel is fairly deep and may roll away from needle. Typically, no more than two to three attempts should be made at a time to minimize distress to the animal and potential damage to the vein.

[0389] 6. Alternately, you can use needle and syringe. Break the seal on the syringe by gently pulling back before using.

[0390] 7. Clear air, and with needle attached to syringe, insert needle firmly at a 90° angle, and aspirate syringe to confirm insertion and collect blood.

[0391] 8. Once collection is complete, remove vacutainer tube. Then, applying pressure over injection site, remove needle. Dispose of needle in approved Sharps container.

[0392] 9. Keep the blood contained in CPT tubes at room temperature. Blood samples will be collected within one hour by IIBR or Phibro members.

[0393] 10. In order to ensure adequate hemostasis, apply pressure for 30 to 60 seconds.

### 6. Criteria for Inclusion/Exclusion and Post Inclusion Removal Criteria:

[0394] Inclusion: clinical and behavioral healthy animals without any signs of disease. Animals started the experiment after a minimum one week of acclimation. During the acclimation period, animals underwent inspection, and only if they continued to look healthy did they start the experiment.

[0395] Exclusion: Animals with extensive wounding and/or illness that was not connected to the experiment. Illness due to the vaccination procedure (such as anorexia). Adverse events reporting and recording: Pigs underwent inspection twice a day. Adverse events were documented and noticed to the study director.

### 7. Animal Management and Housing:

[0396] The health statuses of the animals used in the study was determined before entering the acclimation period, one week before the study's start point. Only animals in good health were acclimatized to laboratory conditions for 7 days prior to study initiation. Pigs were kept in group cages (according to the experimental groups).

[0397] Animal handling was performed according to guidelines of the National Institute of Health (NIH) and the Israeli Council for Experiments on Animals. Animals were housed within a limited access Large Animal unit (Biotech Farm Site) in concrete floor holding pens. Holding pens were cleaned once daily, six days per week.

[0398] Animals were provided with commercially available piglet diet, medical pre-starter for piglets (Kefar yeoshua' feedmil, Kefar yeoshua', Israel), at approximately 2-4% of a given pig's body weight per day, twice a day, and pigs were allowed free access to drinking water supplied by automated watering valves. Environmental conditions were set to maintain temperature at 24±6° C. with a relative humidity (RH) of about 30-70% and a 12-hr light/12-hr dark cycle. RH and temperature were recorded daily.

### 8. Safety of Study Personnel:

[0399] The procedures that were used in this study are considered of low risk to the operators. All procedures were performed with all necessary protective equipment. Face masks were used in order to prevent any spill off penetration.

Disposal of study products: According to Biotech farm approved procedures.
Disposal of study animals: According to Biotech farm approved procedures.

### 9. Assessment of Vaccination:

[0400] At several time points post vaccination, blood was collected into CPT tubes and peripheral blood mononuclear cells (PBMCs) were separated for measuring cellular immune response. Cells (2.5*10⁵, 5*10⁵, 1*10⁶per well) were incubated with each peptide. The positive control was concanavalin A (ConA) and the negative control was medium only. ELISpot assays were performed using CTL or the MabTech IFNγ ELISPOT kit.

[0401] In view of the many possible embodiments to which the principles of the disclosed invention may be applied, a person of ordinary skill in the art will recognize that the illustrated embodiments are only preferred examples of the invention and should not be taken as limiting the scope of the invention. Rather, the scope of the invention is defined by the following claims. We therefore claim as our invention all that comes within the scope and spirit of these claims.

APPENDIX I

| | | Amino Acid |
|---|---|---|
| | SEQ ID NO. | Sequence |
| 1 | 2 | NEMDIVQIFY |
| 2 | 3 | EMDIVQIFY |
| 3 | 7 | RAMVTSVKNFY |
| 4 | 11 | SSNVSLLSL |
| 5 | 17 | ANANRAMLI |
| 6 | 18 | KTLADIYGY |
| 7 | 21 | YANHCRFCW |
| 8 | 57 | RYTQIYKYPLI |
| 9 | 67 | YMENCKFCW |
| 10 | 69 | KSMPLIVENSY |
| 11 | 70 | CTYAKSCDF |
| 12 | 94 | NIDEVHHAY |
| 13 | 95 | RALERLISF |
| 14 | 97 | STYKNTESF |
| 15 | 98 | STYKNTESFY |
| 16 | 99 | KNTESFYPF |
| 17 | 100 | KMIKNTYVL |
| 18 | 102 | NVDEIHHAYF |
| 19 | 103 | SNVHFCISL |
| 20 | 109 | KNYSLSTLY |
| 21 | 110 | YSLSTLYCIF |
| 22 | 113 | RSDIDHMYAF |
| 23 | 124 | FEIYFARLY |
| 24 | 138 | LYVYSKTFYRK |
| 25 | 139 | LYVYSKTFY |
| 26 | 147 | SKTFYRKSWYW |
| 27 | 149 | KTFYRKSWY |
| 28 | 154 | TFYRKSWYW |
| 29 | 159 | RKSWYWFCIF |
| 30 | 161 | RKSWYWFCIFM |
| 31 | 162 | KSWYWFCIF |
| 32 | 163 | KSWYWFCIFM |
| 33 | 169 | KMLSYGMEW |
| 34 | 171 | KVRTFVCCY |
| 35 | 172 | YTLGGTASL |
| 36 | 179 | KLKRAISFFY |
| 37 | 186 | LLSDNPLFL |
| 38 | 187 | TLDNISFNEM |
| 39 | 188 | TLDNISFNEML |
| 40 | 189 | DNISFNEML |
| 41 | 191 | ISFNEMLTR |
| 42 | 195 | SFNEMLTRYW |
| 43 | 198 | NEMLTRYWY |
| 44 | 201 | EMLTRYWYSM |
| 45 | 202 | EMLTRYWYS |
| 46 | 205 | LTRYWYSMAI |
| 47 | 231 | AARQQIAVY |
| 48 | 234 | KTLPSIQNL |
| 49 | 241 | MNFFCNIKL |
| 50 | 247 | YHQKKIWTPY |
| 51 | 251 | QAMFHSIQF |
| 52 | 253 | AMFHSIQFY |
| 53 | 257 | SAMLACVRFY |
| 54 | 266 | MGANINQAM |
| 55 | 269 | LAWEGNLYY |
| 56 | 270 | YSKFRVLLY |
| 57 | 274 | ATYNHRKILIY |
| 58 | 275 | KISHYVATY |
| 59 | 278 | KTDLLNNEF |
| 60 | 279 | SLSTLLLKY |
| 61 | 280 | YAIAIRYNL |
| 62 | 283 | NVFDLHEAY |
| 63 | 287 | YTDLNEWRL |
| 64 | 293 | KSCAGVLLGY |
| 65 | 294 | ALRHNFTKAI |
| 66 | 297 | RHNFTKAIHY |
| 67 | 309 | TKAIHYFYK |
| 68 | 321 | KRHKNHLYWR |
| 69 | 328 | ASLDYGMNL |
| 70 | 329 | NNNTLNMFF |
| 71 | 330 | YMYNLSNIF |
| 72 | 333 | RAYLHETLF |
| 73 | 335 | TMYSLGYIF |
| 74 | 343 | STCSLKCLF |
| 75 | 345 | VSIKGLLPF |
| 76 | 357 | HVIQRLGLY |
| 77 | 370 | QIQDWHILL |
| 78 | 371 | MAIDNGLLPF |
| 79 | 375 | KQIVHTIKY |
| 80 | 379 | KHTLHLLGL |
| 81 | 385 | RTENYNLVCEY |
| 82 | 386 | HSQIQDWHVL |
| 83 | 389 | QIQDWHVLL |
| 84 | 425 | KTLNLLLSY |
| 85 | 429 | STLVIRLLL |
| 86 | 435 | STYFQVKEF |
| 87 | 437 | MQDFSISPEKF |
| 88 | 447 | IIHTIYQSY |
| 89 | 462 | IMQAYALEY |
| 90 | 463 | MQAYALEYAM |
| 91 | 467 | QAYALEYAMY |
| 92 | 469 | RQYDLIQKY |
| 93 | 471 | VTCTFQCLF |
| 94 | 477 | STYTEIVKY |
| 95 | 478 | HNITGYTYL |
| 96 | 481 | AVHNATCLF |
| 97 | 517 | KMIDSYNDY |
| 98 | 527 | LANAFIPPY |
| 99 | 554 | VLIEFLTGFF |
| 100 | 555 | LIEFLTGFFY |
| 101 | 557 | EFLTGFFYLY |
| 102 | 559 | TGFFYLYGK |
| 103 | 563 | RLFSISKVM |
| 104 | 569 | MDMICLDYY |
| 105 | 570 | YTIIPAPLAM |
| 106 | 573 | LAMMLAARL |
| 107 | 608 | KHDARMLINY |
| 108 | 609 | ARMLINYCV |
| 109 | 619 | HIRNGNLTLF |
| 110 | 621 | KTDPWIVNR |
| 111 | 625 | GRIDFLKFLF |
| 112 | 633 | KAAIRGRSL |
| 113 | 646 | GADPTQKDY |
| 114 | 647 | HRGFTAWDW |
| 115 | 651 | FTAWDWAVF |
| 116 | 655 | SLNHDYQNL |
| 117 | 661 | GGLRKSPKL |
| 118 | 662 | LRKSPKLLL |
| 119 | 665 | AVNIMSMKNF |
| 120 | 675 | LSMKNRELF |
| 121 | 687 | YINDISEHEL |
| 122 | 701 | ESTVITTAY |
| 123 | 703 | TVITTAYNF |
| 124 | 711 | FLAFSLHSDMY |
| 125 | 713 | LAFSLHSDMY |
| 126 | 724 | SDMYSVIFNI |
| 127 | 725 | DMYSVIFNIKY |
| 128 | 726 | DMYSVIFNI |
| 129 | 735 | VIFNIKYFLSK |
| 130 | 746 | QMDKLGFLL |
| 131 | 750 | TNFFTLHEL |
| 132 | 756 | CFMMQCKSIY |
| 133 | 762 | SSFSKAVRL |
| 134 | 769 | AMDEAIHAALY |
| 135 | 770 | AAMQGLRNGY |
| 136 | 771 | AMQGLRNGY |
| 137 | 784 | SKQASISSIL |
| 138 | 788 | KQASISSI |
| 139 | 790 | ASISSILNF |
| 140 | 810 | FFFYIMEYF |
| 141 | 815 | IMDVFYETY |
| 142 | 816 | YSLPYNINL |
| 143 | 818 | RTSPSYCEI |
| 144 | 819 | GTNNFVETY |
| 145 | 823 | RTYNILQRF |
| 146 | 825 | SHFNNVSYYW |
| 147 | 826 | NNVSYYWGL |
| 148 | 827 | QTISNHQLSF |
| 149 | 842 | SSMHSGMLYK |
| 150 | 848 | FLKKNIYLY |
| 151 | 849 | HSKALATLLY |
| 152 | 860 | RFNTLHIHY |
| 153 | 863 | MMRRVHASY |
| 154 | 865 | RVHASYPGY |
| 155 | 869 | CTQPARVTY |
| 156 | 872 | RVDMNRFFQFY |
| 157 | 880 | KTVEPTNFL |
| 158 | 896 | ITNKIYMFF |
| 159 | 908 | VGYNNVCYYF |
| 160 | 917 | ESNYWVNYSL |
| 161 | 918 | SNYWVNYSL |
| 162 | 920 | SVLLRDSGYY |
| 163 | 921 | SVLLRDSGY |
| 164 | 923 | KKQKHVSLLY |
| 165 | 925 | KQKHVSLLY |
| 166 | 926 | KQKHVSLLYI |
| 167 | 931 | VSFNKTIIL |
| 168 | 934 | VSWNFFNNSF |
| 169 | 954 | ISTSNETTL |
| 170 | 955 | STSNETTLI |
| 171 | 960 | TTLINCTYL |
| 172 | 962 | TLINCTYLTL |
| 173 | 963 | LINCTYLTL |
| 174 | 971 | LTLSSNYFYTF |
| 175 | 972 | LTLSSNYFYT |
| 176 | 986 | SNYFYTFF |
| 177 | 991 | YFYTFFKLY |
| 178 | 1000 | FKLYYIPLSI |
| 179 | 1006 | LLPKPYSRY |
| 180 | 1009 | SRYQYNTPI |
| 181 | 1010 | SRYQYNTPIYY |
| 182 | 1013 | RYQYNTPIY |
| 183 | 1026 | GSFSPETLGY |
| 184 | 1028 | FTHQYIELY |
| 185 | 1035 | LLYDLYRAGY |
| 186 | 1047 | ASLEFNTFY |
| 187 | 1048 | SLEFNTFYAF |
| 188 | 1049 | AVIEAIGAM |
| 189 | 1064 | KTRGTRLFF |
| 190 | 1065 | KTLKTVYPEY |
| 191 | 1090 | LFPQYISYY |
| 192 | 1091 | FPQYISYY |
| 193 | 1092 | FPQYISYYTKY |
| 194 | 1094 | FPQYISYYTK |
| 195 | 1101 | LIPKHLWSY |
| 196 | 1102 | WIRNNFSISY |
| 197 | 1106 | RTIPVAWDRF |
| 198 | 1107 | MTSLLKTDF |
| 199 | 1118 | FTRFANTSPF |
| 200 | 1129 | ITSNVLTTF |
| 201 | 1139 | SILAEYVYSY |
| 202 | 1141 | YSYNGMLEHY |
| 203 | 1156 | YGVETHWPLY |
| 204 | 1184 | SSIPKNKLF |
| 205 | 1187 | VSNILHSVF |
| 206 | 1193 | MLDSFYKYF |
| 207 | 1194 | ITTEKMLPF |
| 208 | 1196 | KEMQDYSLTFL |
| 209 | 1202 | MQDYSLTFLLK |
| 210 | 1203 | MQDYSLTF |
| 211 | 1204 | QDYSLTFLLK |
| 212 | 1210 | YSLTFLLK |
| 213 | 1227 | SSYNRSLLH |
| 214 | 1228 | RSSTSKSSY |
| 215 | 1231 | KTFNQSGLF |
| 216 | 1239 | RLIMTSFIGY |
| 217 | 1248 | KTLISEMMHY |
| 218 | 1264 | INRNYYPYY |
| 219 | 1265 | INRNYYPYYI |
| 220 | 1276 | NYYPYYIYK |
| 221 | 1277 | NYYPYYIY |
| 222 | 1278 | YPYYIYKIF |
| 223 | 1279 | YIYKIFDAI |
| 224 | 1285 | HLVHFNAHF |
| 225 | 1286 | VHFNAHFKPY |
| 226 | 1287 | HFNAHFKPY |
| 227 | 1288 | KPYVPVGFEY |
| 228 | 1295 | HGQLQTFPR |
| 229 | 1296 | QLQTFPRNGY |
| 230 | 1302 | TKNAYRNLVY |
| 231 | 1318 | ITDATYLDI |
| 232 | 1319 | YLDIRRNVHY |
| 233 | 1323 | AIPSVSIPF |
| 234 | 1329 | SRRNIRFKPW |
| 235 | 1338 | FVTPEIHNLF |
| 236 | 1340 | VTPEIHNLF |
| 237 | 1345 | KLMSALKWPI |
| 238 | 1347 | LMSALKWPIEY |
| 239 | 1348 | MSALKWPIEY |
| 240 | 1366 | FCSSYIPFHY |
| 241 | 1368 | KTPDDPGAMM |
| 242 | 1369 | GAMMITFAL |
| 243 | 1370 | FALKPREEY |
| 244 | 1372 | VSRAREFYI |
| 245 | 1375 | EFYISWDTDY |
| 246 | 1377 | YISWDTDYV |
| 247 | 1378 | VVSASAINF |
| 248 | 1379 | VSASAINFL |
| 249 | 1382 | SASAINFLLL |
| 250 | 1385 | LLQNGSAVL |
| 251 | 1388 | ATSHVATSY |
| 252 | 1389 | QQMLTRHIY |
| 253 | 1390 | NLAGITTLM |
| 254 | 1394 | KTVPKFVPTY |
| 255 | 1399 | KESAETIYTF |
| 256 | 1400 | ESAETIYTF |
| 257 | 1413 | SSMSVSTFW |
| 258 | 1415 | SMSVSTFWPY |
| 259 | 1426 | KAANTPQYY |
| 260 | 1432 | QQNKANKAF |
| 261 | 1436 | KANKAFYINH |
| 262 | 1437 | KANKAFYI |
| 263 | 1438 | KANKAFYINHL |
| 264 | 1441 | NKAFYINHLY |
| 265 | 1448 | AFYINHLYK |
| 266 | 1452 | YINHLYKFL |
| 267 | 1454 | INHLYKFLLI |
| 268 | 1460 | YTLLSPLQSY |
| 269 | 1461 | LLSPLQSYTY |
| 270 | 1468 | AADDTTCYY |
| 271 | 1469 | KSSEWTTIL |
| 272 | 1470 | MSLFWHQKL |
| 273 | 1471 | KVDLPYHLM |
| 274 | 1472 | GILSYTSLY |
| 275 | 1480 | GQYNLKLVY |
| 276 | 1482 | KTIKHYEQL |
| 277 | 1483 | GTSYLRMAY |
| 278 | 1484 | IAHVNTPNF |
| 279 | 1485 | KNLPIDILFY |
| 280 | 1488 | HLQAFLDSY |
| 281 | 1491 | IADAINQEF |
| 282 | 1492 | ASICRQIVLY |
| 283 | 1499 | FLNKSTQAY |
| 284 | 1500 | ALDLSLIGFY |
| 285 | 1501 | KTDPNFKNLY |
| 286 | 1503 | NQAINTFMYY |
| 287 | 1507 | RALEGLDLY |
| 288 | 1508 | TLAQVFESF |
| 289 | 1509 | FTDNAPAGHYY |
| 290 | 1510 | RSLSNFQAL |
| 291 | 1511 | QIYKTLLEY |
| 292 | 1512 | ETEDVFFTF |
| 293 | 1514 | RLAEFYQKL |
| 294 | 1517 | RTMNDFGMM |
| 295 | 1518 | FGMMNQTNY |
| 296 | 1523 | SLMADTKYF |
| 297 | 1528 | RVFSRLVFY |
| 298 | 1531 | FSQAVMEMGY |
| 299 | 1541 | RSIPLANIY |
| 300 | 1543 | GSLYPTQFDY |
| 301 | 1544 | SLYPTQFDY |
| 302 | 1556 | VVFHAGSLY |
| 303 | 1557 | HAGSLYNWF |
| 304 | 1564 | SARIYAGQGY |
| 305 | 1566 | QAQEEWNMIL |
| 306 | 1567 | AQEEWNMIL |
| 307 | 1571 | EQYGKAPDF |
| 308 | 1573 | IRAHNFIQTI |
| 309 | 1574 | IRAHNFIQTIY |
| 310 | 1576 | RAHNFIQTIY |
| 311 | 1577 | AHNFIQTIY |
| 312 | 1580 | MKQFCKISVW |
| 313 | 1592 | KTLESLILPF |
| 314 | 1601 | IMESGSMPL |
| 315 | 1619 | DFDPLVTFY |
| 316 | 1627 | SAMLEFKKF |
| 317 | 1628 | SAMLEFKKFF |
| 318 | 1630 | FTQITRQTF |
| 319 | 1631 | TQITRQTFM |
| 320 | 1633 | IADSATKEV |
| 321 | 1648 | TLMDQPTY |
| 322 | 1649 | RNLRFSRPG |
| 323 | 1651 | RFSRPGNNYI |
| 324 | 1658 | FINSTDFLY |
| 325 | 1666 | RAQQTVRNIL |
| 326 | 1668 | RNILSNDCL |
| 327 | 1669 | RTHLITTLDY |
| 328 | 1684 | NINRINIPYF |
| 329 | 1685 | RQYPGCSRVY |
| 330 | 1693 | ATQQLALNY |
| 331 | 1698 | ALSTSSTGY |
| 332 | 1701 | SSTSGVLPF |
| 333 | 1706 | SVSEPLTQY |
| 334 | 1719 | VVTPKHLTY |
| 335 | 1736 | NQNYFPVQF |
| 336 | 1744 | SFKDWIPEF |
| 337 | 1749 | SMSYFDGKTEY |
| 338 | 1750 | MSYFDGKTEY |
| 339 | 1758 | VQLANSSVYY |
| 340 | 1759 | QLANSSVYY |
| 341 | 1760 | SVYHVQEEL |
| 342 | 1761 | RAFFPCDPY |
| 343 | 1776 | TVLNTFEAY |
| 344 | 1785 | MQDGIRWFYLF |
| 345 | 1823 | SMMDFERVHY |
| 346 | 1824 | MMDFERVHY |
| 347 | 1828 | YVGKGTTIYY |
| 348 | 1835 | GKTMPVEFYY |
| 349 | 1836 | KTMPVEFYY |
| 350 | 1840 | SMFKHFDNM |
| 351 | 1849 | SLNRIVEEF |
| 352 | 1850 | GIIEFNTYY |
| 353 | 1852 | KALQGCYTY |
| 354 | 1853 | FLIDFSNLF |
| 355 | 1863 | SMPMSMIGPY |
| 356 | 1864 | SMIGPYLNVY |
| 357 | 1868 | FVQKLWAAY |
| 358 | 1872 | KLYTAALGVY |
| 359 | 1873 | YSDYVGSGY |
| 360 | 1875 | TMDPQVLNL |
| 361 | 1877 | SHLNNFLPI |
| 362 | 1880 | MTVFPFMIPF |
| 363 | 1882 | AVSDVNGMQY |
| 364 | 1896 | MVAVNLFRF |
| 365 | 1897 | YLKEVYEKY |
| 366 | 1905 | RQVHILEPY |
| 367 | 1908 | ANQKMFYSI |
| 368 | 1911 | KQFEMFNMVY |
| 369 | 1912 | KIHKKLLSPY |
| 370 | 1916 | ISFKHMTSI |
| 371 | 1923 | ILNHICHQY |
| 372 | 1929 | MDSEFFQPV |
| 373 | 1941 | YQDQQWVEV |
| 374 | 1942 | VTDNPVTDRL |
| 375 | 1944 | SAPAHPAEPY |
| 376 | 1945 | TASQTMSAI |
| 377 | 1953 | RTASSAELY |
| 378 | 1960 | SNLNNSCFI |
| 379 | 1969 | ATNFFIQPI |
| 380 | 1982 | LTHNHILFTY |
| 381 | 1986 | ATQFVQHGIY |
| 382 | 1989 | HIYETNLYL |
| 383 | 1991 | YAANLLTNY |
| 384 | 2032 | RSNTPTYLY |
| 385 | 2034 | RSNTPTYL |
| 386 | 2036 | MCGKRNCPLY |
| 387 | 2037 | CGKRNCPLYY |
| 388 | 2038 | CGKRNCPLY |
| 389 | 2044 | RNCPLYYFLL |
| 390 | 2052 | KRLPQFFLRRI |
| 391 | 2053 | KRLPQFFLRR |
| 392 | 2061 | FSNNNTFLYHF |
| 393 | 2068 | RTKFPEINI |
| 394 | 2075 | KSCYPLVF |
| 395 | 2076 | SILCSCISF |
| 396 | 2080 | KSSHNYIPL |
| 397 | 2087 | TTSANSPIVY |
| 398 | 2092 | IAFPPEYPY |
| 399 | 2097 | KIYRQVLTF |
| 400 | 2099 | MVGEYPMCY |
| 401 | 2103 | CALYFNDPF |
| 402 | 2104 | KNVSTVFTYY |
| 403 | 2118 | MQTAIQKNY |
| 404 | 2125 | TAIQKNYFRF |
| 405 | 2126 | AIQKNYFRF |
| 406 | 2127 | AIQKNYFRFFK |
| 407 | 2128 | AIQKNYFRFF |
| 408 | 2129 | IQKNYFRFFK |
| 409 | 2134 | KNYFRFFK |
| 410 | 2144 | KLLTHFNIY |
| 411 | 2146 | LLTHFNIYR |
| 412 | 2153 | QMAPGGSYF |
| 413 | 2159 | RIHTRFGQY |
| 414 | 2166 | KIDDFIRLYP |
| 415 | 2175 | RLYPHIFY |
| 416 | 2183 | PHIFYRPLY |
| 417 | 2185 | HIFYRPLYR |
| 418 | 2205 | MTSSEWIAEY |
| 419 | 2211 | SLVTVNTEY |
| 420 | 2213 | ELFSNNLLF |
| 421 | 2214 | FILDDISFSEM |
| 422 | 2218 | DDISFSEML |
| 423 | 2220 | ISFSEMLTR |
| 424 | 2221 | ISFSEMLTRYW |
| 425 | 2222 | SFSEMLTRY |
| 426 | 2223 | SFSEMLTRYWY |
| 427 | 2225 | FSEMLTRYWY |
| 428 | 2228 | SEMLTRYWYSM |
| 429 | 2229 | SEMLTRYWYS |
| 430 | 2236 | AILYNLTEAI |
| 431 | 2239 | YNLTEAIQYFY |
| 432 | 2241 | YNLTEAIQY |
| 433 | 2242 | NLTEAIQYF |
| 434 | 2245 | TEAIQYFYQRY |
| 435 | 2247 | TEAIQYFYQR |
| 436 | 2251 | AIQYFYQRYR |
| 437 | 2252 | IQYFYQRYR |
| 438 | 2253 | IQYFYQRY |
| 439 | 2255 | QYFYQRYRHF |
| 440 | 2262 | RYRHFKDWR |
| 441 | 2265 | YRHFKDWRL |
| 442 | 2266 | YRHFKDWRLI |

APPENDIX II
Positive Peptides Identified by a Full Screen,
Along with ELISpot Assay Results (Number of
Spots Counted for Each Peptide) for Animal 14S
(Swine 14 From Farm S)

| | SEQ ID | Amino Acid | Number |
|---|---|---|---|
| | NO. | Sequence | of Spots |
| 1 | 69 | KSMPLIVENSY | 255 |
| 2 | 70 | CTYAKSCDF | 35 |
| 3 | 241 | MNFFCNIKL | 16 |
| 4 | 275 | KISHYVATY | 21 |
| 5 | 278 | KTDLLNNEF | 15 |
| 6 | 279 | SLSTLLLKY | 17 |
| 7 | 280 | YAIAIRYNL | 12 |
| 8 | 283 | NVFDLHEAY | 18 |
| 9 | 285 | AMLSSIQYY | 14 |
| 10 | 297 | RHNFTKAIHY | 16 |
| 11 | 309 | TKAIHYFYK | 12 |
| 12 | 321 | KRHKNHLYWR | 14 |
| 13 | 328 | ASLDYGMNL | 13 |
| 14 | 329 | NNNTLNMFF | 12 |
| 15 | 335 | TMYSLGYIF | 12 |
| 16 | 357 | HVIQRLGLY | 13 |
| 17 | 386 | HSQIQDWHVL | 110 |
| 18 | 447 | IIHTIYQSY | 331 |
| 19 | 467 | QAYALEYAMY | 17 |
| 20 | 469 | RQYDLIQKY | 14 |
| 21 | 478 | HNITGYTYL | 33 |
| 22 | 523 | FSKPFMRFIL | 12 |
| 23 | 534 | FTFKFAAHL | 12 |
| 24 | 557 | EFLTGFFYLY | 16 |
| 25 | 585 | RAQKRELLR | 12 |
| 26 | 607 | INCFNYCILY | 12 |
| 27 | 608 | KHDARMLINY | 13 |
| 28 | 625 | GRIDFLKFLF | 15 |
| 29 | 633 | KAAIRGRSL | 14 |
| 30 | 635 | RGRSLNMLSL | 12 |
| 31 | 641 | RSLNMLSLI | 16 |
| 32 | 647 | HRGFTAWDW | 14 |
| 33 | 703 | TVITTAYNF | 13 |
| 34 | 724 | SDMYSVIFNI | 15 |
| 35 | 725 | DMYSVIFNIKY | 15 |
| 36 | 726 | DMYSVIFNI | 14 |
| 37 | 769 | AMDEAIHAALY | 13 |
| 38 | 784 | SKQASISSIL | 12 |
| 39 | 827 | QTISNHQLSF | 13 |
| 40 | 842 | SSMHSGMLYK | 13 |
| 41 | 848 | FLKKNIYLY | 19 |
| 42 | 849 | HSKALATLLY | 13 |
| 43 | 860 | RFNTLHIHY | 14 |
| 44 | 865 | RVHASYPGY | 15 |
| 45 | 869 | CTQPARVTY | 13 |
| 46 | 872 | RVDMNRFFQFY | 15 |
| 47 | 880 | KTVEPTNFL | 66 |
| 48 | 888 | MMHYPTFNW | 12 |
| 49 | 896 | ITNKIYMFF | 18 |
| 50 | 906 | WVGYNNVCY | 12 |
| 51 | 920 | SVLLRDSGYY | 17 |
| 52 | 921 | SVLLRDSGY | 14 |
| 53 | 923 | KKQKHVSLLY | 14 |
| 54 | 925 | KQKHVSLLY | 14 |
| 55 | 926 | KQKHVSLLYI | 16 |
| 56 | 931 | VSFNKTIIL | 12 |
| 57 | 954 | ISTSNETTL | 15 |
| 58 | 960 | TTLINCTYL | 13 |
| 59 | 962 | TLINCTYLTL | 12 |
| 60 | 963 | LINCTYLTL | 19 |
| 61 | 971 | LTLSSNYFYTF | 12 |
| 62 | 1006 | LLPKPYSRY | 13 |
| 63 | 1049 | AVIEAIGAM | 15 |
| 64 | 1065 | KTLKTVYPEY | 36 |
| 65 | 1090 | LFPQYISYY | 106 |
| 66 | 1106 | RTIPVAWDRF | 130 |
| 67 | 1107 | MTSLLKTDF | 18 |
| 68 | 1111 | LSYMPPNIF | 13 |
| 69 | 1120 | FSYEKNLLF | 13 |
| 70 | 1127 | RALKMYEDY | 12 |
| 71 | 1129 | ITSNVLTTF | 14 |
| 72 | 1139 | SILAEYVYSY | 12 |
| 73 | 1141 | YSYNGMLEHY | 18 |
| 74 | 1150 | NLSEVVTAY | 12 |
| 75 | 1159 | RSIETYYPEW | 12 |
| 76 | 1172 | SEDFQYWTF | 12 |
| 77 | 1187 | VSNILHSVF | 15 |
| 78 | 1188 | TSIKPVSPF | 13 |
| 79 | 1196 | KEMQDYSLTFL | 17 |
| 80 | 1204 | QDYSLTFLLK | 17 |
| 81 | 1227 | SSYNRSLLH | 12 |
| 82 | 1228 | RSSTSKSSY | 15 |
| 83 | 1264 | INRNYYPYY | 12 |
| 84 | 1265 | INRNYYPYYI | 12 |
| 85 | 1278 | YPYYIYKIF | 16 |
| 86 | 1279 | YIYKIFDAI | 12 |
| 87 | 1287 | HFNAHFKPY | 14 |
| 88 | 1288 | KPYVPVGFEY | 16 |
| 89 | 1295 | HGQLQTFPR | 17 |
| 90 | 1345 | KLMSALKWPI | 16 |
| 91 | 1347 | LMSALKWPIEY | 17 |
| 92 | 1348 | MSALKWPIEY | 12 |
| 93 | 1370 | FALKPREEY | 14 |
| 94 | 1372 | VSRAREFYI | 12 |
| 95 | 1375 | EFYISWDTDY | 15 |
| 96 | 1379 | VSASAINFL | 13 |
| 97 | 1388 | ATSHVATSY | 14 |
| 98 | 1390 | NLAGITTLM | 12 |
| 99 | 1394 | KTVPKFVPTY | 14 |
| 100 | 1400 | ESAETIYTF | 14 |
| 101 | 1413 | SSMSVSTFW | 12 |
| 102 | 1436 | KANKAFYINH | 13 |
| 103 | 1437 | KANKAFYI | 12 |
| 104 | 1454 | INHLYKFLLI | 12 |
| 105 | 1461 | LLSPLQSYTY | 13 |
| 106 | 1468 | AADDTTCYY | 13 |
| 107 | 1472 | GILSYTSLY | 16 |
| 108 | 1483 | GTSYLRMAY | 12 |
| 109 | 1484 | IAHVNTPNF | 14 |
| 110 | 1488 | HLQAFLDSY | 13 |
| 111 | 1491 | IADAINQEF | 13 |
| 112 | 1499 | FLNKSTQAY | 14 |
| 113 | 1501 | KTDPNFKNLY | 14 |
| 114 | 1503 | NQAINTFMYY | 13 |
| 115 | 1507 | RALEGLDLY | 13 |
| 116 | 1509 | FTDNAPAGHYY | 17 |
| 117 | 1510 | RSLSNFQAL | 15 |
| 118 | 1511 | QIYKTLLEY | 17 |
| 119 | 1512 | ETEDVFFTF | 21 |
| 120 | 1514 | RLAEFYQKL | 15 |
| 121 | 1517 | RTMNDFGMM | 13 |
| 122 | 1519 | MMNQTNYSI | 13 |
| 123 | 1523 | SLMADTKYF | 14 |
| 124 | 1528 | RVFSRLVFY | 13 |
| 125 | 1531 | FSQAVMEMGY | 12 |
| 126 | 1543 | GSLYPTQFDY | 12 |
| 127 | 1544 | SLYPTQFDY | 14 |
| 128 | 1556 | VVFHAGSLY | 13 |
| 129 | 1566 | QAQEEWNMIL | 14 |
| 130 | 1567 | AQEEWNMIL | 13 |
| 131 | 1571 | EQYGKAPDF | 14 |
| 132 | 1573 | IRAHNFIQTI | 12 |
| 133 | 1580 | MKQFCKISVW | 12 |
| 134 | 1619 | DFDPLVTFY | 16 |
| 135 | 1627 | SAMLEFKKF | 12 |
| 136 | 1628 | SAMLEFKKFF | 12 |
| 137 | 1630 | FTQITRQTF | 12 |
| 138 | 1631 | TQITRQTFM | 12 |
| 139 | 1633 | IADSATKEV | 14 |
| 140 | 1648 | TLMDQPTY | 14 |
| 141 | 1649 | RNLRFSRPG | 18 |
| 142 | 1651 | RFSRPGNNYI | 17 |
| 143 | 1658 | FINSTDFLY | 12 |
| 144 | 1685 | RQYPGCSRVY | 12 |
| 145 | 1693 | ATQQLALNY | 12 |
| 146 | 1701 | SSTSGVLPF | 13 |
| 147 | 1706 | SVSEPLTQY | 13 |
| 148 | 1718 | KAQFIKEGY | 15 |
| 149 | 1736 | NQNYFPVQF | 13 |
| 150 | 1749 | SMSYFDGKTEY | 15 |
| 151 | 1750 | MSYFDGKTEY | 17 |
| 152 | 1753 | FANAMQAYL | 13 |
| 153 | 1759 | QLANSSVYY | 15 |
| 154 | 1761 | RAFFPCDPY | 12 |
| 155 | 1767 | RIFAGKMLSY | 13 |
| 156 | 1783 | MQDGIRWFYL | 13 |
| 157 | 1810 | KIKNSVPSY | 13 |
| 158 | 1814 | KASPSPMEM | 17 |
| 159 | 1823 | SMMDFERVHY | 25 |
| 160 | 1824 | MMDFERVHY | 14 |
| 161 | 1828 | YVGKGTTIYY | 14 |
| 162 | 1830 | MALAKMYTL | 12 |
| 163 | 1835 | GKTMPVEFYY | 21 |
| 164 | 1836 | KTMPVEFYY | 17 |
| 165 | 1840 | SMFKHFDNM | 14 |
| 166 | 1852 | KALQGCYTY | 15 |
| 167 | 1864 | SMIGPYLNVY | 13 |
| 168 | 1873 | YSDYVGSGY | 12 |
| 169 | 1875 | TMDPQVLNL | 12 |
| 170 | 1880 | MTVFPFMIPF | 12 |
| 171 | 1912 | KIHKKLLSPY | 12 |
| 172 | 1923 | ILNHICHQY | 13 |
| 173 | 1941 | YQDQQWVEV | 12 |
| 174 | 1955 | RTARHNLSL | 14 |
| 175 | 1982 | LTHNHILFTY | 14 |
| 176 | 1986 | ATQFVQHGIY | 13 |
| 177 | 1989 | HIYETNLYL | 14 |
| 178 | 1991 | YAANLLTNY | 29 |
| 179 | 2037 | CGKRNCPLYY | 12 |
| 180 | 2038 | CGKRNCPLY | 12 |
| 181 | 2075 | KSCYPLVF | 12 |
| 182 | 2092 | IAFPPEYPY | 17 |
| 183 | 2118 | MQTAIQKNY | 13 |
| 184 | 2125 | TAIQKNYFRF | 14 |
| 185 | 2126 | AIQKNYFRF | 13 |
| 186 | 2127 | AIQKNYFRFFK | 15 |
| 187 | 2134 | KNYFRFFK | 16 |
| 188 | 2137 | NYFRFFKKL | 12 |
| 189 | 2141 | RFFKKLLTH | 12 |
| 190 | 2142 | KKLLTHFNI | 12 |
| 191 | 2146 | LLTHFNIYR | 16 |
| 192 | 2159 | RIHTRFGQY | 15 |
| 193 | 2166 | KIDDFIRLYP | 13 |
| 194 | 2175 | RLYPHIFY | 16 |
| 195 | 2181 | YPHIFYRPL | 12 |
| 196 | 2183 | PHIFYRPLY | 15 |
| 197 | 2185 | HIFYRPLYR | 15 |
| 198 | 2193 | RSCDYAPGFY | 12 |
| 199 | 2194 | TTADLQSPF | 12 |
| 200 | 2205 | MTSSEWIAEY | 13 |
| 201 | 2211 | SLVTVNTEY | 12 |
| 202 | 2213 | ELFSNNLLF | 12 |
| 203 | 2222 | SFSEMLTRY | 12 |
| 204 | 2223 | SFSEMLTRYWY | 12 |
| 205 | 2225 | FSEMLTRYWY | 12 |
| 206 | 2241 | YNLTEAIQY | 14 |
| 207 | 2242 | NLTEAIQYF | 12 |
| 208 | 2251 | AIQYFYQRYR | 12 |
| 209 | 2252 | IQYFYQRYR | 13 |
| 210 | 2265 | YRHFKDWRL | 13 |
| 211 | 2266 | YRHFKDWRLI | 14 |

APPENDIX III
Positive Peptides Identified by a Full Screen,
Along with ELISpot Assay Results (Number of
Spots Counted for Each Peptide) for Animal H
(Swine 9 From Farm H)

| | SEQ ID | Amino Acid | Number |
|---|---|---|---|
| | NO. | Sequence | of Spots |
| 1 | 56 | RYTQIYKYPL | 23 |
| 2 | 64 | VSRWYNQCTY | 32 |
| 3 | 66 | HVMDCSDPV | 62 |
| 4 | 84 | KSELSYWCTY | 16 |
| 5 | 85 | SMECLHPRPY | 20 |
| 6 | 369 | HTLQWLGLY | 16 |
| 7 | 439 | KRNVLIKGI | 16 |
| 8 | 449 | EILKLATFY | 19 |
| 9 | 458 | VSEYINYLF | 16 |
| 10 | 478 | HNITGYTYL | 19 |
| 11 | 554 | VLIEFLTGFF | 16 |
| 12 | 565 | KVMDMICLDY | 17 |
| 13 | 653 | AVFTGNMEL | 16 |
| 14 | 743 | SKFCNHMFFR | 16 |
| 15 | 744 | NHMFFRSCV | 18 |
| 16 | 756 | CFMMQCKSIY | 19 |
| 17 | 757 | FMMQCKSIY | 16 |
| 18 | 835 | RSEWASSNTF | 26 |
| 19 | 836 | SEWASSNTF | 31 |
| 20 | 839 | ASSSMHSGMLY | 16 |
| 21 | 842 | SSMHSGMLYK | 23 |
| 22 | 847 | KTFYISPNKY | 21 |
| 23 | 848 | FLKKNIYLY | 71 |
| 24 | 857 | KQMFNVDITY | 17 |
| 25 | 860 | RFNTLHIHY | 19 |
| 26 | 872 | RVDMNRFFQFY | 18 |
| 27 | 884 | SAINHFNYTM | 19 |
| 28 | 889 | ALEDHYGLY | 16 |
| 29 | 896 | ITNKIYMFF | 26 |
| 30 | 908 | VGYNNVCYYF | 16 |
| 31 | 920 | SVLLRDSGYY | 35 |
| 32 | 923 | KKQKHVSLLY | 16 |
| 33 | 977 | LSSNYFYTFF | 18 |
| 34 | 1001 | KLYYIPLSI | 21 |
| 35 | 1019 | QTNCQLYFF | 21 |
| 36 | 1020 | IITAMTHLM | 18 |
| 37 | 1024 | LVDEIYSTL | 20 |
| 38 | 1033 | FTSGYMPLLY | 16 |
| 39 | 1080 | FRDHFIALF | 16 |
| 40 | 1091 | FPQYISYY | 17 |
| 41 | 1151 | SVLEKYLQW | 16 |
| 42 | 1184 | SSIPKNKLF | 16 |
| 43 | 1187 | VSNILHSVF | 16 |
| 44 | 1205 | QDYSLTFLL | 17 |
| 45 | 1207 | DYSLTFLLK | 17 |
| 46 | 1212 | FLLKKRMEL | 19 |
| 47 | 1296 | QLQTFPRNGY | 16 |
| 48 | 1437 | KANKAFYI | 16 |
| 49 | 1454 | INHLYKFLLI | 18 |
| 50 | 1459 | SVTEFYTKL | 19 |
| 51 | 1461 | LLSPLQSYTY | 17 |
| 52 | 1767 | RIFAGKMLSY | 21 |
| 53 | 1841 | SMFKHFDNMVY | 17 |
| 54 | 1950 | LVDHIFNYL | 16 |
| 55 | 1952 | SRTASSAELY | 17 |
| 56 | 2139 | YFRFFKKLL | 19 |
| 57 | 2140 | RFFKKLLTHF | 16 |
| 58 | 2171 | IRLYPHIFYR | 18 |
| 59 | 2197 | KAIELYWVF | 17 |

APPENDIX IV
201 Positive Peptides from ELISpot Screenings

| | | Amino Acid |
|---|---|---|
| | SEQ ID NO. | Sequence |
| 1 | 1 | STNEDNQLM |
| 2 | 2 | NEMDIVQIFY |
| 3 | 3 | EMDIVQIFY |
| 4 | 8 | AMVTSVKNFY |
| 5 | 9 | MVTSVKNFY |
| 6 | 18 | KTLADIYGY |
| 7 | 26 | YIKIHQHYY |
| 8 | 32 | HQHYYINI |
| 9 | 36 | HYYINIYMYL |
| 10 | 37 | YYINIYMYL |
| 11 | 67 | YMENCKFCW |
| 12 | 69 | KSMPLIVENSY |
| 13 | 70 | CTYAKSCDF |
| 14 | 81 | YISQCSIARY |
| 15 | 84 | KSELSYWCTY |
| 16 | 87 | VLNRPLSIFY |
| 17 | 89 | YMNCSLPTYF |
| 18 | 93 | MTRNTLVLKF |
| 19 | 94 | NIDEVHHAY |
| 20 | 99 | KNTESFYPF |
| 21 | 100 | KMIKNTYVL |
| 22 | 101 | NVDEIHHAY |
| 23 | 118 | GANEKFAHY |
| 24 | 124 | FEIYFARLY |
| 25 | 128 | IYFARLYVY |
| 26 | 129 | IYFARLYVYSK |
| 27 | 159 | RKSWYWFCIF |
| 28 | 173 | YQNERYMIM |
| 29 | 180 | RAISFFYQTY |
| 30 | 185 | SMVDCCHKNY |
| 31 | 186 | LLSDNPLFL |
| 32 | 187 | TLDNISFNEM |
| 33 | 192 | ISFNEMLTRYW |
| 34 | 193 | SFNEMLTRY |
| 35 | 210 | RYWYSMAIL |
| 36 | 220 | YSMAILYK |
| 37 | 221 | MAILYKLTEAI |
| 38 | 265 | SYSAIYYCF |
| 39 | 268 | KLPEFFDEY |
| 40 | 271 | WIYENLHIY |
| 41 | 272 | HIYNMIDTF |
| 42 | 275 | KISHYVATY |
| 43 | 277 | MRIEIFWEL |
| 44 | 278 | KTDLLNNEF |
| 45 | 279 | SLSTLLLKY |
| 46 | 283 | NVFDLHEAY |
| 47 | 284 | QAMLSSIQYY |
| 48 | 285 | AMLSSIQYY |
| 49 | 294 | ALRHNFTKAI |
| 50 | 302 | HNFTKAIHY |
| 51 | 308 | FTKAIHYFYKR |
| 52 | 312 | KAIHYFYK |
| 53 | 313 | KAIHYFYKRHK |
| 54 | 343 | STCSLKCLF |
| 55 | 357 | HVIQRLGLY |
| 56 | 360 | KKTLNLLLSY |
| 57 | 363 | YMVDFMREF |
| 58 | 364 | RLHYLKSLVY |
| 59 | 365 | KEMFNLARFY |
| 60 | 369 | HTLQWLGLY |
| 61 | 370 | QIQDWHILL |
| 62 | 371 | MAIDNGLLPF |
| 63 | 375 | KQIVHTIKY |
| 64 | 377 | NTFFLPSDF |
| 65 | 386 | HSQIQDWHVL |
| 66 | 394 | NMLSILVKY |
| 67 | 400 | RKLEILTWM |
| 68 | 404 | EMFSLGYKI |
| 69 | 405 | SLGYKIVFEY |
| 70 | 435 | STYFQVKEF |
| 71 | 447 | IIHTIYQSY |
| 72 | 449 | EILKLATFY |
| 73 | 452 | RRTESKKLFL |
| 74 | 455 | SIVSEYINY |
| 75 | 456 | IVSEYINYL |
| 76 | 457 | IVSEYINYLF |
| 77 | 461 | EIMQAYALEY |
| 78 | 462 | IMQAYALEY |
| 79 | 463 | MQAYALEYAM |
| 80 | 467 | QAYALEYAMY |
| 81 | 468 | HVVQRLGLY |
| 82 | 469 | RQYDLIQKY |
| 83 | 478 | HNITGYTYL |
| 84 | 486 | AAAGGLLNF |
| 85 | 492 | IVDDYIRFLF |
| 86 | 496 | ISLRLFEVK |
| 87 | 497 | RLFEVKPKY |
| 88 | 527 | LANAFIPPY |
| 89 | 529 | RKYIHKIIL |
| 90 | 541 | CNACKTLNY |
| 91 | 544 | LNYKHYKTL |
| 92 | 547 | SHLEGFMRTY |
| 93 | 548 | EGFMRTYLL |
| 94 | 549 | RYIWSGLVY |
| 95 | 553 | VLIEFLTGF |
| 96 | 554 | VLIEFLTGFF |
| 97 | 559 | TGFFYLYGK |
| 98 | 561 | KRLFSISKVM |
| 99 | 570 | YTIIPAPLAM |
| 100 | 578 | KNYDLMKRL |
| 101 | 584 | VVDDVPSIDY |
| 102 | 588 | KYLMNCSGF |
| 103 | 589 | KNIIKELVF |
| 104 | 619 | HIRNGNLTLF |
| 105 | 621 | KTDPWIVNR |
| 106 | 633 | KAAIRGRSL |
| 107 | 636 | RGRSLNMLSLI |
| 108 | 639 | GRSLNMLSL |
| 109 | 640 | GRSLNMLSLI |
| 110 | 645 | SLNMLSLIKF |
| 111 | 647 | HRGFTAWDW |
| 112 | 651 | FTAWDWAVF |
| 113 | 652 | WAVFTGNMEL |
| 114 | 653 | AVFTGNMEL |
| 115 | 662 | LRKSPKLLL |
| 116 | 670 | YTLCDSPAY |
| 117 | 680 | SIIPFADAL |
| 118 | 681 | RTVEICCRY |
| 119 | 711 | FLAFSLHSDMY |
| 120 | 713 | LAFSLHSDMY |
| 121 | 728 | MYSVIFNIK |
| 122 | 731 | YSVIFNIKYF |
| 123 | 732 | SVIFNIKYF |
| 124 | 743 | SKFCNHMFFR |
| 125 | 773 | VSQSMSLNY |
| 126 | 796 | ISSILNFFF |
| 127 | 822 | YFAPSFAIF |
| 128 | 828 | ISNHQLSFTY |
| 129 | 885 | AINHFNYTM |
| 130 | 888 | MMHYPTFNW |
| 131 | 914 | KTLNLTKTY |
| 132 | 927 | VSLLYICSK |
| 133 | 957 | NETTLINCTY |
| 134 | 1012 | RYQYNTPIYY |
| 135 | 1019 | QTNCQLYFF |
| 136 | 1049 | AVIEAIGAM |
| 137 | 1064 | KTRGTRLFF |
| 138 | 1069 | YLMQHFRDH |
| 139 | 1096 | QYISYYTKY |
| 140 | 1104 | SISYIPLIY |
| 141 | 1106 | RTIPVAWDRF |
| 142 | 1111 | LSYMPPNIF |
| 143 | 1141 | YSYNGMLEHY |
| 144 | 1156 | YGVETHWPLY |
| 145 | 1188 | TSIKPVSPF |
| 146 | 1196 | KEMQDYSLTFL |
| 147 | 1203 | MQDYSLTF |
| 148 | 1233 | RQTMMSSIY |
| 149 | 1248 | KTLISEMMHY |
| 150 | 1253 | RTDLNNCVSL |
| 151 | 1256 | KGRINRNYY |
| 152 | 1280 | TTNRRILQY |
| 153 | 1282 | ASGGAFCLI |
| 154 | 1288 | KPYVPVGFEY |
| 155 | 1295 | HGQLQTFPR |
| 156 | 1325 | VSIPFGERF |
| 157 | 1340 | VTPEIHNLF |
| 158 | 1345 | KLMSALKWPI |
| 159 | 1348 | MSALKWPIEY |
| 160 | 1372 | VSRAREFYI |
| 161 | 1374 | RAREFYISW |
| 162 | 1380 | VSASAINFLL |
| 163 | 1437 | KANKAFYI |
| 164 | 1440 | ANKAFYINHL |
| 165 | 1464 | LTQRPVMGY |
| 166 | 1472 | GILSYTSLY |
| 167 | 1512 | ETEDVFFTF |
| 168 | 1531 | FSQAVMEMGY |
| 169 | 1543 | GSLYPTQFDY |
| 170 | 1556 | VVFHAGSLY |
| 171 | 1560 | SGRIVTTAI |
| 172 | 1561 | VTTAIKTLL |
| 173 | 1584 | MLGNLSAAKY |
| 174 | 1623 | FLIPETILF |
| 175 | 1635 | YSDPETVHSY |
| 176 | 1652 | FSRPGNNYI |
| 177 | 1653 | ELNITSPAM |
| 178 | 1676 | VVIMAIMLY |
| 179 | 1715 | RVYLDGELY |
| 180 | 1740 | ASSIVSNLF |
| 181 | 1744 | SFKDWIPEF |
| 182 | 1745 | FQNFSKSLY |
| 183 | 1823 | SMMDFERVHY |
| 184 | 1832 | KTHYSIPSSF |
| 185 | 1836 | KTMPVEFYY |
| 186 | 1860 | AAFNQQYIF |
| 187 | 1865 | FMNFDPAHNEY |
| 188 | 1911 | KQFEMFNMVY |
| 189 | 1924 | GVKHFLHEY |
| 190 | 1929 | MDSEFFQPV |
| 191 | 1952 | SRTASSAELY |
| 192 | 1991 | YAANLLTNY |
| 193 | 2020 | KTFQDIRII |
| 194 | 2021 | CGMKNISEI |
| 195 | 2044 | RNCPLYYFLL |
| 196 | 2049 | YLKRLPQFF |
| 197 | 2112 | IISMMQTAI |
| 198 | 2113 | ISMMQTAIQK |
| 199 | 2136 | KNYFRFFKKL |
| 200 | 2204 | SVEELLSAV |
| 201 | 2205 | MTSSEWIAEY |

APPENDIX V
77 Positive Peptides from ELISpot Screenings,
and Corresponding ASFV Proteins

| | SEQ | Amino Acid | Corresponding |
|---|---|---|---|
| | ID NO. | Sequence | ASFV Protein |
| 1 | 32 | HQHYYINI | AYW33961.1 |
| 2 | 67 | YMENCKFCW | AYW33963.1 |
| 3 | 69 | KSMPLIVENSY | AYW33963.1 |
| 4 | 70 | CTYAKSCDF | AYW33964.1 |
| 5 | 101 | NVDEIHHAY | AYW33969.1 |
| 6 | 128 | IYFARLYVY | AYW33971.1 |
| 7 | 187 | TLDNISFNEM | AYW33974.1 |
| 8 | 278 | KTDLLNNEF | AYW33992.1 |
| 9 | 279 | SLSTLLLKY | AYW33992.1 |
| 10 | 363 | YMVDFMREF | AYW33999.1 |
| 11 | 377 | NTFFLPSDF | AYW34001.1 |
| 12 | 400 | RKLEILTWM | AYW34001.1 |
| 13 | 404 | EMFSLGYKI | AYW34001.1 |
| 14 | 435 | STYFQVKEF | AYW34001.1 |
| 15 | 447 | IIHTIYQSY | AYW34001.1 |
| 16 | 449 | EILKLATFY | AYW34001.1 |
| 17 | 455 | SIVSEYINY | AYW34001.1 |
| 18 | 456 | IVSEYINYL | AYW34001.1 |
| 19 | 457 | IVSEYINYLF | AYW34001.1 |
| 20 | 461 | EIMQAYALEY | AYW34001.1 |
| 21 | 462 | IMQAYALEY | AYW34001.1 |
| 22 | 463 | MQAYALEYAM | AYW34001.1 |
| 23 | 467 | QAYALEYAMY | AYW34001.1 |
| 24 | 468 | HVVQRLGLY | AYW34002.1 |
| 25 | 469 | RQYDLIQKY | AYW34002.1 |
| 26 | 478 | HNITGYTYL | AYW34002.1 |
| 27 | 486 | AAAGGLLNF | AYW34003.1 |
| 28 | 492 | IVDDYIRFLF | AYW34003.1 |
| 29 | 496 | ISLRLFEVK | AYW34004.1 |
| 30 | 497 | RLFEVKPKY | AYW34004.1 |
| 31 | 527 | LANAFIPPY | AYW34004.1 |
| 32 | 529 | RKYIHKIIL | AYW34004.1 |
| 33 | 541 | CNACKTLNY | AYW34004.1 |
| 34 | 544 | LNYKHYKTL | AYW34004.1 |
| 35 | 547 | SHLEGFMRTY | AYW34005.1 |
| 36 | 548 | EGFMRTYLL | AYW34005.1 |
| 37 | 549 | RYIWSGLVY | AYW34007.1 |
| 38 | 553 | VLIEFLTGF | AYW34010.1 |
| 39 | 554 | VLIEFLTGFF | AYW34010.1 |
| 40 | 561 | KRLFSISKVM | AYW34010.1 |
| 41 | 578 | KNYDLMKRL | AYW34010.1 |
| 42 | 584 | VVDDVPSIDY | AYW34010.1 |
| 43 | 589 | KNIIKELVF | AYW34010.1 |
| 44 | 619 | HIRNGNLTLF | AYW34011.1 |
| 45 | 621 | KTDPWIVNR | AYW34011.1 |
| 46 | 633 | KAAIRGRSL | AYW34011.1 |
| 47 | 636 | RGRSLNMLSLI | AYW34011.1 |
| 48 | 639 | GRSLNMLSL | AYW34011.1 |
| 49 | 640 | GRSLNMLSLI | AYW34011.1 |
| 50 | 645 | SLNMLSLIKF | AYW34011.1 |
| 51 | 651 | FTAWDWAVF | AYW34011.1 |
| 52 | 652 | WAVFTGNMEL | AYW34011.1 |
| 53 | 653 | AVFTGNMEL | AYW34011.1 |
| 54 | 662 | LRKSPKLLL | AYW34011.1 |
| 55 | 670 | YTLCDSPAY | AYW34012.1 |
| 56 | 711 | FLAFSLHSDMY | AYW34013.1 |
| 57 | 713 | LAFSLHSDMY | AYW34013.1 |
| 58 | 743 | SKFCNHMFFR | AYW34013.1 |
| 59 | 1049 | AVIEAIGAM | AYW34032.1 |
| 60 | 1106 | RTIPVAWDRF | AYW34037.1 |
| 61 | 1156 | YGVETHWPLY | AYW34044.1 |
| 62 | 1248 | KTLISEMMHY | AYW34052.1 |
| 63 | 1253 | RTDLNNCVSL | AYW34052.1 |
| 64 | 1280 | TTNRRILQY | AYW34052.1 |
| 65 | 1282 | ASGGAFCLI | AYW34053.1 |
| 66 | 1288 | KPYVPVGFEY | AYW34053.1 |
| 67 | 1437 | KANKAFYI | AYW34060.1 |
| 68 | 1440 | ANKAFYINHL | AYW34060.1 |
| 69 | 1531 | FSQAVMEMGY | AYW34063.1 |
| 70 | 1556 | VVFHAGSLY | AYW34064.1 |
| 71 | 1560 | SGRIVTTAI | AYW34064.1 |
| 72 | 1561 | VTTAIKTLL | AYW34064.1 |
| 73 | 1584 | MLGNLSAAKY | AYW34065.1 |
| 74 | 1991 | YAANLLTNY | AYW34108.1 |
| 75 | 2021 | CGMKNISEI | AYW34111.1 |
| 76 | 2112 | IISMMQTAI | AYW34117.1 |
| 77 | 2204 | SVEELLSAV | AYW34126.1 |

APPENDIX VI
18 “Top” Peptides from ELISpot Screenings,
and Corresponding ASFV Proteins

| | SEQ | Amino Acid | Corresponding |
|---|---|---|---|
| | ID NO. | Sequence | ASFV Protein |
| 1 | 67 | YMENCKFCW | AYW33963.1 |
| 2 | 69 | KSMPLIVENSY | AYW33963.1 |
| 3 | 70 | CTYAKSCDF | AYW33964.1 |
| 4 | 279 | SLSTLLLKY | AYW33992.1 |
| 5 | 435 | STYFQVKEF | AYW34001.1 |
| 6 | 461 | EIMQAYALEY | AYW34001.1 |
| 7 | 469 | RQYDLIQKY | AYW34002.1 |
| 8 | 478 | HNITGYTYL | AYW34002.1 |
| 9 | 486 | AAAGGLLNF | AYW34003.1 |
| 10 | 547 | SHLEGFMRTY | AYW34005.1 |
| 11 | 548 | EGFMRTYLL | AYW34005.1 |
| 12 | 549 | RYIWSGLVY | AYW34007.1 |
| 13 | 561 | KRLFSISKVM | AYW34010.1 |
| 14 | 589 | KNIIKELVF | AYW34010.1 |
| 15 | 639 | GRSLNMLSL | AYW34011.1 |
| 16 | 652 | WAVFTGNMEL | AYW34011.1 |
| 17 | 653 | AVFTGNMEL | AYW34011.1 |
| 18 | 1253 | RTDLNNCVSL | AYW34052.1 |

APPENDIX VII
Forty-four Peptides of Appendices V
and/or VI Clustered Within Seven
ASFV Proteins

| | | | Peptide |
|---|---|---|---|
| | | Peptide | Amino |
| | ASFV | SEQ ID | Acid |
| | Protein | NO. | Sequence |
| 1 | AYW34011.1 | 619 | HIRNGNLTLF |
| | | 621 | KTDPWIVNR |
| | | 633 | KAAIRGRSL |
| | | 636 | RGRSLNMLSLI |
| | | 639 | GRSLNMLSL |
| | | 640 | GRSLNMLSLI |
| | | 645 | SLNMLSLIKF |
| | | 651 | FTAWDWAVF |
| | | 652 | WAVFTGNMEL |
| | | 653 | AVFTGNMEL |
| | | 662 | LRKSPKLLL |
| 2 | AYW34004.1 | 496 | ISLRLFEVK |
| | | 497 | RLFEVKPKY |
| | | 527 | LANAFIPPY |
| | | 529 | RKYIHKIIL |
| | | 541 | CNACKTLNY |
| | | 544 | LNYKHYKTL |
| 3 | AYW34001.1 | 377 | NTFFLPSDF |
| | | 400 | RKLEILTWM |
| | | 404 | EMFSLGYKI |
| | | 435 | STYFQVKEF |
| | | 447 | IIHTIYQSY |
| | | 449 | EILKLATFY |
| | | 455 | SIVSEYINY |
| | | 456 | IVSEYINYL |
| | | 457 | IVSEYINYLF |
| | | 461 | EIMQAYALEY |
| | | 462 | IMQAYALEY |
| | | 463 | MQAYALEYAM |
| | | 467 | QAYALEYAMY |
| 4 | AYW34010.1 | 553 | VLIEFLTGF |
| | | 554 | VLIEFLTGFF |
| | | 561 | KRLFSISKVM |
| | | 578 | KNYDLMKRL |
| | | 584 | VVDDVPSIDY |
| | | 589 | KNIIKELVF |
| 5 | AYW34052.1 | 1248 | KTLISEMMHY |
| | | 1253 | RTDLNNCVSL |
| | | 1280 | TTNRRILQY |
| 6 | AYW34002.1 | 468 | HVVQRLGLY |
| | | 469 | RQYDLIQKY |
| | | 478 | HNITGYTYL |
| 7 | AYW33963.1 | 67 | YMENCKFCW |
| | | 69 | KSMPLIVENSY |

APPENDIX VIII
Peptides (125 total) IV that of APPENDIX
Met or Exceeded the Stringent
Threshold

| | SEQ | |
|---|---|---|
| | ID | Amino Acid |
| | NO. | Sequence |
| 1 | 1 | STNEDNQLM |
| 2 | 2 | NEMDIVQIFY |
| 3 | 3 | EMDIVQIFY |
| 4 | 8 | AMVTSVKNFY |
| 5 | 9 | MVTSVKNFY |
| 6 | 18 | KTLADIYGY |
| 7 | 26 | YIKIHQHYY |
| 8 | 36 | HYYINIYMYL |
| 9 | 67 | YMENCKFCW |
| 10 | 69 | KSMPLIVENSY |
| 11 | 70 | CTYAKSCDF |
| 12 | 81 | YISQCSIARY |
| 13 | 84 | KSELSYWCTY |
| 14 | 87 | VLNRPLSIFY |
| 15 | 89 | YMNCSLPTYF |
| 16 | 93 | MTRNTLVLKF |
| 17 | 101 | NVDEIHHAY |
| 18 | 124 | FEIYFARLY |
| 19 | 128 | IYFARLYVY |
| 20 | 129 | IYFARLYVYSK |
| 21 | 159 | RKSWYWFCIF |
| 22 | 185 | SMVDCCHKNY |
| 23 | 186 | LLSDNPLFL |
| 24 | 187 | TLDNISFNEM |
| 25 | 210 | RYWYSMAIL |
| 26 | 221 | MAILYKLTEAI |
| 27 | 268 | KLPEFFDEY |
| 28 | 272 | HIYNMIDTF |
| 29 | 275 | KISHYVATY |
| 30 | 278 | KTDLLNNEF |
| 31 | 279 | SLSTLLLKY |
| 32 | 285 | AMLSSIQYY |
| 33 | 294 | ALRHNFTKAI |
| 34 | 357 | HVIQRLGLY |
| 35 | 360 | KKTLNLLLSY |
| 36 | 363 | YMVDFMREF |
| 37 | 365 | KEMFNLARFY |
| 38 | 369 | HTLQWLGLY |
| 39 | 371 | MAIDNGLLPF |
| 40 | 394 | NMLSILVKY |
| 41 | 400 | RKLEILTWM |
| 42 | 404 | EMFSLGYKI |
| 43 | 435 | STYFQVKEF |
| 44 | 447 | IIHTIYQSY |
| 45 | 449 | EILKLATFY |
| 46 | 456 | IVSEYINYL |
| 47 | 457 | IVSEYINYLF |
| 48 | 461 | EIMQAYALEY |
| 49 | 462 | IMQAYALEY |
| 50 | 463 | MQAYALEYAM |
| 51 | 467 | QAYALEYAMY |
| 52 | 468 | HVVQRLGLY |
| 53 | 469 | RQYDLIQKY |
| 54 | 478 | HNITGYTYL |
| 55 | 486 | AAAGGLLNF |
| 56 | 492 | IVDDYIRFLF |
| 57 | 496 | ISLRLFEVK |
| 58 | 497 | RLFEVKPKY |
| 59 | 527 | LANAFIPPY |
| 60 | 541 | CNACKTLNY |
| 61 | 544 | LNYKHYKTL |
| 62 | 547 | SHLEGFMRTY |
| 63 | 548 | EGFMRTYLL |
| 64 | 549 | RYIWSGLVY |
| 65 | 553 | VLIEFLTGF |
| 66 | 554 | VLIEFLTGFF |
| 67 | 561 | KRLFSISKVM |
| 68 | 570 | YTIIPAPLAM |
| 69 | 578 | KNYDLMKRL |
| 70 | 588 | KYLMNCSGF |
| 71 | 589 | KNIIKELVF |
| 72 | 619 | HIRNGNLTLF |
| 73 | 621 | KTDPWIVNR |
| 74 | 633 | KAAIRGRSL |
| 75 | 639 | GRSLNMLSL |
| 76 | 640 | GRSLNMLSLI |
| 77 | 645 | SLNMLSLIKF |
| 78 | 651 | FTAWDWAVF |
| 79 | 652 | WAVFTGNMEL |
| 80 | 653 | AVFTGNMEL |
| 81 | 662 | LRKSPKLLL |
| 82 | 711 | FLAFSLHSDMY |
| 83 | 713 | LAFSLHSDMY |
| 84 | 728 | MYSVIFNIK |
| 85 | 743 | SKFCNHMFFR |
| 86 | 773 | VSQSMSLNY |
| 87 | 885 | AINHFNYTM |
| 88 | 888 | MMHYPTFNW |
| 89 | 957 | NETTLINCTY |
| 90 | 1012 | RYQYNTPIYY |
| 91 | 1049 | AVIEAIGAM |
| 92 | 1064 | KTRGTRLFF |
| 93 | 1069 | YLMQHFRDH |
| 94 | 1106 | RTIPVAWDRF |
| 95 | 1111 | LSYMPPNIF |
| 96 | 1233 | RQTMMSSIY |
| 97 | 1248 | KTLISEMMHY |
| 98 | 1253 | RTDLNNCVSL |
| 99 | 1256 | KGRINRNYY |
| 100 | 1280 | TTNRRILQY |
| 101 | 1282 | ASGGAFCLI |
| 102 | 1288 | KPYVPVGFEY |
| 103 | 1295 | HGQLQTFPR |
| 104 | 1325 | VSIPFGERF |
| 105 | 1345 | KLMSALKWPI |
| 106 | 1348 | MSALKWPIEY |
| 107 | 1437 | KANKAFYI |
| 108 | 1440 | ANKAFYINHL |
| 109 | 1531 | FSQAVMEMGY |
| 110 | 1556 | VVFHAGSLY |
| 111 | 1560 | SGRIVTTAI |
| 112 | 1561 | VTTAIKTLL |
| 113 | 1715 | RVYLDGELY |
| 114 | 1860 | AAFNQQYIF |
| 115 | 1865 | FMNFDPAHNEY |
| 116 | 1911 | KQFEMFNMVY |
| 117 | 1929 | MDSEFFQPV |
| 118 | 1952 | SRTASSAELY |
| 119 | 1991 | YAANLLTNY |
| 120 | 2021 | CGMKNISEI |
| 121 | 2049 | YLKRLPQFF |
| 122 | 2112 | IISMMQTAI |
| 123 | 2113 | ISMMQTAIQK |
| 124 | 2136 | KNYFRFFKKL |
| 125 | 2204 | SVEELLSAV |

We claim:

1. A peptide, comprising at least a portion of one or more amino acid sequences selected from SEQ ID NOs: 2310-2322 or 2330-2335.

2. The peptide of claim 1, further comprising one or more spacer sequences located between two or more of the amino acid sequences.

3. The peptide of claim 2, wherein the one or more spacer sequences comprise GPGPG, AAY, or a combination thereof.

4. An isolated nucleic acid molecule encoding an amino acid sequence having at least 85% sequence identity to the peptide of claim 1.

5. An isolated nucleic acid molecule encoding an amino acid sequence the amino acid sequence of the peptide of claim 1.

6. The isolated nucleic acid molecule of claim 4, operably linked to an expression control sequence, a selection-related sequence, a sequence comprising multiple cloning sites, or a combination thereof.

7. A viral vector comprising the isolated nucleic acid molecule of claim 4, wherein the vector is a viral vector.

8. The viral vector of claim 7, wherein the virus is a Herpesvirus, Adenovirus, Circovirus, Alphavirus, Orthopoxvirus, Avulavirus, or Poxvirus.

9. The viral vector of claim 8, wherein the virus is a Pseudorabies virus, Porcine circovirus, Sindbis virus, Vaccinia virus, Newcastle virus, or Suipoxvirus.

10. An isolated host cell comprising the vector of claim 7.

11. The isolated host cell of claim 10, wherein the cell is a recombinant yeast cell or a recombinant bacterial cell.

12. The isolated host cell of claim 10, wherein the cell is a recombinant yeast cell selected from the genus Saccharomyces or Pichia.

13. The isolated host cell of claim 10, wherein the cell is a recombinant bacterial cell selected from the genus Salmonella, Escherichia, Listeria, Shigella, Pseudomonas, Bordetella, Bacillus, Yersinia, Mycobacterium, Lactobacillus, Lactococcus, or Vibrio.

14. A composition, comprising:
the peptide of claim 1 or a nucleic acid encoding the peptide of claim 1; and
an adjuvant.

15. A composition, comprising:
the vector of claim 7; and
an adjuvant.

16. A composition, comprising:
at least one peptide, or a nucleic acid encoding the at least one peptide, wherein the at least one peptide comprises an amino acid sequence having at least 85% sequence identity to 5 or more consecutive amino acids of an amino acid sequence encoded by SEQ ID NO: 1; and
an adjuvant.

17. The composition according to claim 16 comprising at least one peptide comprising an amino acid sequence having at least 85% sequence identity to 5 or more consecutive amino acids of an amino acid sequence encoded by any one of SEQ ID NOs: 2339-2345.

18. The composition of claim 16, wherein the at least one peptide comprises an amino acid sequence having at least 85% sequence identity to an amino acid sequence encoded by any one of SEQ ID NOs: 2274-2291.

19. The composition of claim 18, wherein the at least one peptide comprises at least one construct sequence, and the sequence has at least 85% sequence identity to any one of SEQ ID NOs: 2310-2322 or 2330-2335.

20. The composition of claim 16, wherein the at least one peptide is 5 to 50 amino acids in length.

21. The composition of claim 16, comprising 2 or more peptides.

22. The composition of claim 21, further comprising one or more spacer sequences located between at least two peptides.

23. The composition of claim 16, wherein the at least one adjuvant is selected from oil adjuvants, oil-in-water adjuvants, water-in-oil adjuvants, water-in-oil-in-water adjuvants, immune-stimulating complexes (ISCOMs), liposomes, polysaccharides, derivatized polysaccharides, oligonucleotides, cytokines, bacterial derivatives, viral derivatives, aluminum hydroxide, potassium hydroxide, complete Freund's adjuvant, incomplete Freund's adjuvant, saponin, squalene, gel adjuvants, polyacrylic acid adjuvants, or a combination thereof.

24. The composition of claim 16, wherein the at least one adjuvant is Carbigen 222.

25. The composition of claim 16, further comprising at least one additional component selected from a carrier, at least one additional therapeutic, or a combination thereof.

26. The composition of claim 16, wherein the at least one peptide is glycosylated, PEGylated, lipidated, cyclized, acetylated, amidated, conjugated, has undergone D-amino acid incorporation, or a combination thereof.

27. The composition of claim 16, formulated for administration to an animal by injection, aerosol delivery, mucosal administration, oral administration, topical administration, or a combination thereof.

28. The composition of claim 16, wherein the composition reduces or prevents infection by ASFV in an animal, reduces or ameliorates at least one symptom associated with ASFV in an animal, prevents mortality associated with ASFV in an animal, or a combination thereof, relative to an animal that is not administered the composition.

29. The composition of claim 28, wherein the animal is a swine.

30. A vaccine, comprising at least one peptide of claim 1.

31. A vaccine, comprising the composition of claim 16.

32. A method, comprising administering to swine an effective amount of the vaccine according to claim 30.

33. A method, comprising administering to swine an effective amount of the vaccine according to claim 31.

The application's sequence listing, which the Patent Office published only in electronic form, follows.

SEQUENCE LISTING (2345 sequences)

SEQ ID NO: 1 - DNA, 189393 bp, African swine fever virus
atataccatattattgctattgccatcaatgagaatgccacgtaggcataggtcatcctatggccggaccaatccatggctgcacttaaaaatatcaaaaaagtttaagttttgggccggcgttaaaatttaaaccttttctggttgatctttagccatgtatagctgcgatgtttggtgccttatctacatgctattggcattcctgatattcgcactaaagtgctatgttacaaccgtcttatgcgtgatttttatccaccttattggccgaagggccgccttgtatttcctgttaggtggtttggccgtattctactggtggcaagcagctatcaataaaatttaatggctctcacttaagatccttgctgtaagcgggcgtttacatactttgatcaagaaaaaaaattatttttggaccccccccatgttttatacaaaaatcatataataaagtggcgacaatcaacatattaatcaaccacagcattttatgatgtgttaatcaacatataccatattaatcaaccacagcattttatgatgcgtcaatcaacatattattacggagagcgtcaatcaatataatattgagaacagcgacttgataccgtgtatggtggtggcggcggcatgttgtttgtaacagcatttttcatcattcgaagcttacaaaagatatgtataagatagcatattaatgttattaacagtaatatcaataaggcgtagctatagatcttcactttggtagaccaataatccatggttgcgcttaaaaataccaaaaaaaacattaagttttggagggtaagattggtttttcaccattggtaaagattattattctaaatgtttaccccatagatgtgaaacaatgattcttcatatattaacatattttttgacttatacttttcttcatctagtaaggcgttaattttttccggatctgtcgtttttattgataaaagagaagagtctggactgtaatttttaaataataagatatttattaatatccaattattcgtttggctcgctatttccatgctctcttcgaaagcatcagctcctaaatctatacaaaggaataagttaccttcacaaaaattcattaccgaggtaatcattgcccgattaatgtcagcccccaacataaaacaataatatatagttgtataattacaatcatacatacaggccaactgcatcatttcatcaatgtctatatttgtcttctctttgttataaatttcatgaaggtcaaagacgttgttataagcaaccccacatattaaccgccaatctttaaaatgactatatcgttgataaaaatattggatggcttcagtaagcttatatagtatcgccatactataccaatacctagttagcatttcgttgaatgaaatattatccaatgtaaagttaattgataatgtatctagttcaccaaaaattcttaatttcagttgagcattatttaggaaaaggggattatcagataataattcatggcatagaataatattactgctagttttaacatactgtacattataaaatatttctaaaattttattttcactcaaagctttcctcgcacctaacttttggcataggtcctggtgcactccatattgacagtaaccaacccaaagctgatgtctgcaccccattcggtaaacagctctattaaaccatgattgttttcctgtacagccttcattaatgcaacatttaatgttaaaccatgtttaaaacttgctgtttttattaatatttgttcatctatacaagtatgataaatcgtaattggggcttcatgccaccacaaaccacaacgctctaaaatacaataatcatcttttaacacaggctgtgtagctagtacttttttagtaagtgcttgtaaagtagatggcatcttctatctgcaaaataattatttccgaaaaaaaaatcaaattaaaatactaaattctattttttttttaataaagcctgtaaattatataataaatctcgcccaccgtattatttccggacacaactttttatacctcattatatttttagatctatagttttttaacaaggcattaattttttctggatctgtcgtttttaaagataaaagagagacgtttgaactataataatctttaaatgataatatttctactaatatatcatgattcttttgttttgctaattctaagctctcttcgaaagcattagctcctaaatctatacaaaagaacaagttattcatataaaagttttttaccgaggtaaccattgcccgattgatgtcagcccccaatacaaaacaatagtaaatggttaaaaaattgctatctctcatacaggccagatatatcatttcatcaatattcatatcaaccttttttatatgatacatttcatgaagatcagacacgttattaaaagaaagcccacatattagccgccaatctttaaaatgactatatcgttgataaaaatattggatggcttcagtaagcttacatagtatcgctatactataccaatatctagttagcatttcgttgaatgttatttcattcaatataaagttgatcgatatcttctctagaaaacaacaaattattacttttaattcctctatattctggaaaaggggattattagataacaatttatggcataaaataatattactactagttttaatacgatgtattttataaaatatttgtacaatatccatttcattcaaaatttttgcgcctaactcccggcagaaattccaagtatgctccgtattgacagtgactaagctagagttgatgtctgcaccccattcagtaaacaactctattagatcatagttgttttcctgcacagttttcattaatgcgagatttaactctaaaccatctttaaaaattgctgattttatcatcaattgattatcctcattagtagaaagcataattggagctccatgccaccacaaaccacaatatttcaaaataaagtagtgttctttagatatgtgctgtgtggccagtatttttttagcaagagcctgcagagaaattggagtagacatatttttttttgcaaaatggtttaagtttttcaagaatacagattggataaattaggttgttgacttagttacaggaggtattaaatattatgtagacataaaaatgagatcctccaaaaaaataaacaacaaaaaaaaatatgtttaatattaaaatgacaatttctacattgcttattgctcttattatactacttattattattttagtagtgtttttatactataagaaacaacaaccaccgaaaaaggtctgtaaagtagataaagattgtggtagtggagagcattgtgttcgtggatcatgtagctcattgagctgcttagatgccgtaaaaatggacaaacgaaatattaagatagattctaagatttcctcatgcgaattcactcccaatttttaccgttttacggatactgctgctgatgagcagcaagaatttggaaaaacacggcatcctataaaaataactccatctccaagtgaatcccatagcccccaagaggtgtgtgaaaaatattgttcatggggaaccgatgactgtacaggttgggaatatgttggtgatgaaaaggagggaacatgttatgtatataataatccacatcacccggttcttaaatatggtaaggatcacatcatagccttacctagaaatcataaacatgcataaataaatacattaggctcatcgtatctttttaaaatccataaatattcgtttgatatatgctgaaatttttataaaaaaaaataactatttcctataaatcatctagaaatagtcctcgttttgatcggtttatatcttataatattgtgcatcgatgcacaactgctttttttggtccttctggaacatcattatattttctttcattaatataccattcagatgtaaacgttgaataatttttatggcaacaatctaccattgaattatatttagtaacatctaatacatcgtttgttttatcaggctcagctctataatcttgataatttttgttatcagcttctaaagctccatcattatttttcaaagaagtatccataattatgtttggtaaaaatactttaagttttaatgtgatatttaaaatggttgttatataaatttaccgcttacaggtaatctttattcagtgtcataaactatacttttgatgattcagtattttgtgaatcagtacatttattatcattaatatttttaggctgtttttccaatgttttattgttgcaatgagcctgctcctcctttgacgaggaagtgtctgttggagtcatctgtttaggaagagtatcatccatatctattatgaagaaaatatataaatattgatatacaatcaaaaatatttttgatcacgtctttgttatctatcgatattgttgataacgtcttgaataacctacatcatttttttacataaaaaaatagatataatttttattatatctcaattattttaaagataattatcaatacagcaaatatcataagctaacatatttttcgaataatagttttttagtaaagtattaatcttttcaggattggtttcttttgataataagataggattcgctttataaatttttaaagataatatattcacaatgatagaataaccgtatatatctgctaatgtcttactgtgttcaataacattagcccctaaatccatacaaaagaacatattttcaatacaaaagttttttaccgagattaacattgctcgattagcgttggctcccaatgcaaaacagtagtaaatggtcaaaaaattattatcgcgcatacaggccagctccatcattttattaatactcatatgaattttcgttgtgttacatatttcatgaaggtcaaacacattgttgaaagaaagtgcacaaattaatcgccattcatcaaaatgcctgtattcttgacaaaaatattgaatagcttctttaagattatattttaccgctatgccataccaatatttggttagcatctcactaaatgagatctcatttaacatagaatttgttgttaaatccttcaactcccaataaatgatcatccttaaatccaccatgtttacattttgtaaaaaagggttattagaaaataattcatgacacaaaatgacattactacttgttattttacactttgtttcaaagaaaaatcgtaaaatttcacttgtctcaagctcttctttagctcccaattttcggcataggtttcgagtatgctcgttattaataaaaagtaacccataattaatatttgcaccccattcagtaaacaacatgattagatcatcattgttttccttaactgccaataccaatgcagtattaagccttataccctctttaaagcataatgtccttatcattatttgattatcatcatctatatacattgagataggagcttcatgccaccataaaccataacgctctaaaatataataatcatctttagatacgtgttgcgtggccaatgcccttttagcaagtgcttgtaaagtcgatggctgcatgtttattctgttaaaaaaaaatcaaattatcgggtaaacataaggatcaacccgtagttaatatttgcagtagtattttttaacaatgaattataataaaaaaataattcattactatctattataaaacccatctttaactttaaagaagaactagatcatcttttttttgttgtgtcagaacttcttcaatttattacccacattttatctaaaaaaaataaaaactacatcatatcttgtttcttcatcaaattatcataccatttatagggtgtaggttgggaacattccatcatgtggtaatcagggtatttatatattttttgatagtaacatctatttggcagatgtattgtccaacaatcatgtctaataaaatcattttcacctatgggggaatcatcttaaaaaccttattcctacagattccattttgacagtcctagcaaaagtcacaatattttccatgagtacaccaatgttcaagctctctttcgggaggaatgctgccaattttatgttttttagcttctaactctctgtacaacatcagttgggaaagcagaaagaagattaccaggagaaccattaaatatataatagtctgcaaactacgtttgcgaatgtaatttgcaactaaaacacaacccacaaggtaaaatccataagttaataacttttgccattttcgtatgacagcctcgtgccattcatggttgtgttgtgggcattctgttcggtaaacttcatgaggctttatagaagttacatagtaggtacagaattcattgtgacgaaaaacactgcagttagctatgtagtcattttcaagaatgggagaatggttttcaaagaccttattcttacagatgccatcttgacagtcccaacagaacctacaatgatttgcataggtgcaccagtattcaagctccttttcaggaggggttcttgttagatccaggagctctagctcatatgtataaagaagagttggaatggatagtaaagtaaatatttgcagaccaagcatggctacttgtgaacaagtggctgctcgtcaacaaatagctgtttatcagcaaatagctgtttatcagcaacaactaattatcagcaaatgctgcttgtgggtaagccaataaataggccatacccttgaaaggagaattcagtttgataaaaaaaataacgagttttctaataacccggtcaagcatttaataaatgaatagcatcacacgtctgcatcgtgcattctgcctggaaaatgggcccatctctaatatatttacactgacggtgaatcatacagtgttccatgggatagctatgctcctgtacaggaggcatatcttttagaactttattcttacaaagaccatcttgacaagcccagcaaaaccgacaatttttcacatattgacaccagtatctaagctcctcttccaggggattgtcggtcgaaaacccctgtagactagctaggccagctagcagcaagccgaggtaactaaagaacctcattgtagtgttatattacgaaaaaacatgttaaaatttggaaaaaaaagccctttttatagatctggaaaaaaattttcacaaatctaattaaaagccttacagatcatccttttcataaattttcattaacaattggtgggggcggttgtgaggtactggatcagaacaatccataacatggtaatgtccatttccttcaccatatgtacactggttataccagcgagaaacctcacaagatgtcaaataactgttctcaacaatcaatggcatgctcttattcaccttgttcttgcaaattccatgtgcacattcccagcaaaacttgcagttttccatgtaagtacaccagtatccaagttcttcttgtggaggattatccgttgaacgaagatgccctcctgcctgagtaggtagtcctaagacctgattggccagcaggccaagaatttccaagaagatcaccaacattgctacggctggctgaacagctggcagatagctagctaattagcaaaccaagtgactcgccctctctactcttaatatgagaatttaagattcggtccggcttttttcccatgttttacagggaaaaggtatttttagcctatgaatgtacatggttccgcacattaaaaaaaaataaaagaaattatttaatattggctgttattttctttcaactagcaacaagccaggtaactaaagaacttcattgtagttttatattacggaaaaggttaaattttggacaaaaaaaatcatatctaattaaaaatcctcacagatctttcttttcataaattttcattaacaattggtaggggcggttgtgaggtactggatcagaacaatccataacatggtaatgcccatttccttcaccatatgtacactggttataccagcgagaaacctcacatgttgtcaagtagctgttttcaataatcaatggcatgctattattcaccttgttcttgcaaattccatgtgcacattcccagcaaaacttgcacctttccatgtaagtgcaccagtatccaagttcttcttgtggaggattatccgttgaacgaagatgccctcctgcctgagtaggtagtcctacgacctgattggccagcaggccaagaattcccaagaagactaccaacattgctacggctggctgaacagctggcagatagctagctaattagcaaaccaagtgactcaccctctctactcttaatatgagaatttaagatccggtccgacatttttccgatattttacaagaaaaagatatttttagctacaaatacacttcatatatccctaaaaaaaacaaaaatttatttaattttaactattattttctttccactctctctttaagattttgtaaggattccagggctttggttcagaacaggccattacatggtgaatcccctgtcctagatcatacatacatttatttagccagcgggaaactatacatgattgcacatactcattttcaagaattgttgtattctccaatttgccctcacaaaggccattttgacaattccagcaaaacttgcagttttctgtataagtgcaccagtattcaagttcttcttgtggaggattatccgttggatgaagttgtccagctggttgattaggtagccctaagacctggttgcaattcatggtatggtagatacccttatctaaatcatacatacatttatccagccaacgggaaaccagacatgatttcacatactcattcttgtaaattactgacccatctattttgtttatacaagtgccgtcttggcagtcccagcaaaattggcaactttccatgtaggcacaccagtattcgagttcttcctctggaggctcctctgttggacgaagttgtccaacgagctgacttgaaacctggctggccagaaggccaagaattcccaagaagatcaccaacattgctacggctggctgaacagctgactgaatagctagccaattagcaatccactgtacttttcataagatcatttaagattcggtcggcattttttcaatagtttgctaggaaaaaatttttaattttatagattcacactacttcattctcatgcttaggaaaaaaacaaactaaatcttacaatgtatctggatctaatgagaagctagaattcatcttttttcaaatcctttctgggatgttcattctttttccactccttccttgcaattttataaggattccagggctttgggtcagaacagttcatgctatggtaaatgtgctcctccacatcatatctacataggtcaccccagcgggaaacctcacaatattttacatagtcattctcaataatacttgtggagttgtttccccaaaccctgctggtacaaatcccatcttcacaatcccagcagaaccgacagctttccacataagtgcaccagtatccaagttcattctctgggggttcaaatgttagaggaagatgtccacctacccgagtagaagtggaggatgaaaccaggttgctactggccagcaggccaataattcccaggataatcaccagcattgtgctcaaccagcaacggctagcaacgactagcaactgactagcaatagctagaaatggctagcaatcagtagtagctaacgctctactctttataagaaaatttaaaattcgatcagatttttttagaattgagaatgagtaaaacgcttatattctttttctagctagaaaaaataagctagtttaagataggatttcccttactaacggtttaatttttagcaaaggtataggtaaaatacacttgtacttagctgcaaaaaaataagcttatggcgtataagccgccataagtttatttaattaaaatgttaaactctgtgataagactggaatcttaggcaggtttgatgtggagaacagcatgaaatacaagagtgcctgttacacgaataagttctctcaaaccggggatggtcatactcacatctatgaaatcctggtctaggagattcatttgatgcatgatggccgcacccacacttatgagacactgaagaactaaagggtttaattttgatctgaatggtactatataggatgatggcaatccatatcaagattagagcaatcaaaatcacctcctcaagaagcatgatgtagccttaaatcttagactgctttaaaccttaggccctcactatctttaatgaaggagtttaaattttgatccctttttcaagacccatttagaagaaaaaaataaagtttatatcaatctaattcataagtcatctctttcataaatcttcatgtattctctatgtggataagtatgggatgttggatttgcgcagtccatttgatgatctgtatggtttttgggtccttcataataactacatataccattccagcgggaaaccgtgcaatttataatccagtcattttgatgaataactggccaatctgtttgaatcctgtttcggcagataccgtggacgcattcccagcaaaagtcacattggtttgcgtaagtgcaccaataaactagctcatgttcaggaggataacgggttggtagtaaatcttctaatttacgtataggagcggcttgaaggacaaccacccccagtagtactagaatcagtacctttatagtggccaccctacactagacctctaagttgaagacaaagaactaaaatttagagccgtttaattactactaataattatattttttattgtctacaataggattctattaaaaaataatgatttttaccaagaaatatttttataaaaaattaatatattttgtaataaactttatttccaatgactgttaaaataaggaaactatccttagttagtcgaggaagatggttaggttatttcgcaatccgataaaatgtttattttatcgtaggtctcgtaaaatccaggaaaaaaaattacggaagagtttaaaaaagctaaatttttaccaccctccagaagattgttgtcaaatatatcgtttgctagaaaatgttcctggaggaacttactttattacagaaaatatgacgaatgatttaattatggtcgtaaaggattcggtggataaaaaaattaaaagcattaaattatatcttcatggaagttatattaagattcatcagcactattatattaatatttatatgtatcttatgagatatacccaaatttataaatatcccttaatttgttttaacaaatattataacatctaagtaaatattcttggaatggattttcttatagaatggttacaggatatgtcagcgacaggcttaataacaaatttgttaatatttttttgttaaataaatgaacaggccaccatttaatattacccgttgcaaaataagaaaaaaaaacaaacttatagttacaaatcatcttgattaatcacatgtcgttttaactcaatgaaccattctaaatctttgggttgtgaacaattcatgttatgttgatagtgtatcctaaagtgagcttcatacatacaccggtcatgccaccgggaaactgtacaattaacaatataatcattttgcgtaataatagggtggtcactaaacactttatttttacacattccatctttacaggtccagcagaagtcacagtgttttgcataggtgcaccagaacttgagatccctttcaggaggcctacgcatttgcatcggattatctgtggaaagaggtaggttcattattatgttcgtcatcaaaattcctaaaagaacatagaagccaagaaagataagcagtcttgtagcggcttgcattcgcattcgtgagtattgtttgcgaacatagcttatgagagcaatggtagctatcatacaaagacaagtatgtttgatattctcagtgtcaatgaccctatcctcctttatttgcattaactcatcaaaccaatcataatatgtgggatttgtacagctcatgatgtgaaagcggcgtatcctagagtctgtaaagtagctacatctttcattatagcgagaaaccctacatatttgtatgtaatcattttttttgatgagagggtgtttttcaaaaaccttatttttacaaaccccgtgtcgacaattccagcagaagtcacacgattttgcataggtgcaccaatactcaagctctctctttggaggtctccgggtcattggtaactctcctgttcctggaaaagattggctttgaatgaccggctgcatgaccgccagtaccaaaaggaacacaatcaccttcatggctgcaacttataagttgcaacttatgggttgcaatactgcaacgtataggttgcaccttatagatcgcgactcaaaaggtatgaaaaccttaccctcaatacagaatttaagttttaatcctgataatgtatctgtttatgaaaaaaaattttttttactcatgtatgaattcttatacgaatcataatatgtaggctgagaataataattcatatacggtgttgcgggctcaataaaaattttgttaccacaaaaaataaatgctggatttttaagatatatatctattaatgactaaaccctttatacgctgtaggctgaaaacaatccatataatgaatatacggtgatttgggtttaataaaatacatacaacggtcaaaatagcgggcaatactacattgactaatataatcattttgtttaataagaggcatatcatcccacactttatttttacaaataccgttcctacattcccagcagaaatcacagtgttttccatacgtgcaccagtattcaagctctcttataggaggcgtataagtccttggtaaattttgtttcatataaaagatggaaaggggtcgatttaaacccggctgagatagccaaatcaaaatacataaaagagcaagtagtttcatagtggtatttagatgtaaatttttatagtatgcaaatacaatgtaacctacaaatacaatactaaatacaaggtaaaaacaacaatgtcttataatgattggccaataatcacccccccccccatttttccatgaatatttcatttcctgtatagggtctaggatgtgaacactccatgttatgatgattaggcattttaactgatatttcataaaaacacccccaggaattgcgattaactatacagtttacaatcgaattcatcgaattagactcatttgttatcttatttttacaaatgccattttgacaatcccagcagaagtcacaattctttacatacgtacaccaatatggaagctcctccttaggaggatgctgggttcttggtaattctggtaattcatgtgcaagaatgaggactgagtagcccaacaaaagtcctagaaccttcatgttgtgtccaaatggcacctgtcattttaaaaaagatttaaattttgctaccgcaaaaaaaaatccagtatgtatttttttaatacatataattattgaagtcttataagataaagccgagaacactatattttgtatagatgatgtatccggtattcaaactctcttataagtacatgtaggaaatggtcaattattcaagattggctgagataacaacaaaaccaaaatactcaaaagcataagtaatttcatggttgtactcagtcgtagatttttgcagatcgcaaatgcaacgcaaccagcaaatacaaagctaaatacaaggtaaaaacaataataccttataatgattggccaattcttatccctccatttttccatgaacatttcatgttcataaagtctaggatacgaacaacatttcatgctatgatgattaggtattttaagtgatatttcataaaaacaccacggggttgttggtgattgataggtaagaataaggatggttgaataacctagtaaaagtcctagaaaaaccttcatattgcgttcataccacagatgttatttaaaaaaaatataaattttacagtatgtgatatacacataccacaaaaatgttcttatattaactaaaatatgtgggcagagagcaattcatataatgaatatatggtattttaggctcaataaagtacatacaacgatcaataaaacgggtaatactacatttactgatgtaatcattttgaacaataagaggcatatcatccaaaaccttatttttacaaataccattcttacaatcccagcagaaatcacagtgttttccatacgtacaccaatattcaagttctctcataggaggcgtataggtccttggtaaaatttgtttcgtataaaagatggaaaggggtcgatttaaaactggctgtgctaaccaaaccaaaatactcaaaagaacgaaaagtttcatggttgtactcagacgcagattcttacaaagcgcacatacaaagcagcctgtatatgcaataccaatgatgaaatagagacagtattgctttatagataattgttgatggtcaccccccccccccccccatgtttgcatgaatatttcatttcctgtatagggtctaggatgtaaacattccatgctaaagtgattaggcattttagatgaaatttcatataaacaggattgagtcttggaatcacggaaaactctacagtttacaatagaatgattggagtcaatgaaacgagattccgttatcttatttttgcaaatgccatcttgacagtcccaacagaaatcgcattgtggtacatacgtacaccaatatgaaagctcactcttgggaggatgctgggttcttggtaagtctggtaattcatgtgcgagaatgaggactgagtagcccaacaaaagtcccagaagaaccttcatgttgcgtctaaatgacacctgcacttacaaaaaaaaatttaaattttgaatataacacaaaaaaaccaccttaaaatttcttatattatttcttggatctgccccgacgtcatacaatgtattaaaattatagaccaatcatctttttgtatataggctaatcatctttatatatagattttagatgtttgcttgttgtatcaacttaactgctagcgaagaaaatggataaaaactttctgtatttttataggttgaaatcattttatgcacatcgctaggatctaatattttattttgaagaaccgaatgtgggcttaaaatttttttcttagaaaaaagtagaatcataatattgctatgtttttgtttaatgatttcttgtatcttttttgtatacgggttggcacccaaacctatacaaaaatatacattactcaaataactaccttctatacataatcttttttccccacgtattttcctatttatttccctatttatggaattaaaggatatcaatctctctaaggcacggtcaaggtctgcgcctaaggcaaaacaataatatatacctaatttattcccagggcgtgcacaggcaagaaacatcatgacgtttagccctaaacgtatattttcctgaaaatacgcatgatgaacttcatcaatattacctaagtatatggccgtttgtaaacgccaaagatctaaatgaggaaattttttactaagataatgaataggttttgtgagattaaaatctatggcgaacttataccaaaattttaatacaagtgtatttctcgtcatttcttcttctttttcatctaaatataagataaaacgattgtaaacaaagtctatcaataggtgaaaatcattgctattaaagctgtcgagaatcaaaatattgtcataataaatttcgatcgccagtaaaaccttttttcgtttgacgagataaacaaacatattatacaaccctacatctaaaaattctggattggctcctagttggatacacaggtctttagtctgcttcgttttggcacacatgatgccaaaattaatatcagcaccccataaaacaaataacttgattagatcagtctggttttccttcacagcttttactaaggctctgtcaagctcatagctgtcgacatcagagcatgacatagagccaccggttaccattttacattgcttacaaaaacctatgggtccgttttcccaccatagtccaagctgttgtagaataaaaatatcatcctcatgataatttgaaaaagccttggtttctatcaagactttttttgtaagaacctgtaaagagttcatcgtattattatgaataacaggagtaaacgtaatcaattataaaagtgattttttcgaaaaaaactttagatggttgaaaatgataatgtacatgttcatacaaaaaatagatgcagtgatgtctaaaatcaaaatttaattttctatgtaaaaagtacagacttacttatttgggttaaattgtttattttaaactttaattaaccgtttgagttagcgatgtttgatttatcttccatactcatccggggggggtccttatagctctgacattattgtggattattgaatataatgaatacttcatagatgctaaacattttaatagtagttctgaggcttaattgtactctataaatttataaaaactttttgatcaaaatttaatttcttataaaaagagtacagacgtcgcttgtttaagcttcatcatgtttcattcattactttctacaattacgggggggggagtcccctcatagctttagtattgctatggtttactaattattatgtagaatttatagaagcatatgtacctgaaagtatacctactctataaaattaaataatttcagtatattttttttatgaatagaacggaaatgatataaaaataatttaatattgcaaaaaaaattcataatgttggtatgtattataaacataatagcatgtgtaatttataaactgactcctctatataattattagatgaggtaccaacctacttatgatatgccgatgatagatattgtatactataaaacaaaattattttaaatgtattcatggatacattataacatttttaccgcaaattgtctctcagcgaagaaaatgaatgaaacgtttctgtatattcataggttgaaattattttacgcacttcactaggttctaatattttcttatgaagtattgaatgggggcttaaaagtcctttcttaaaaagaagtttcatcataacattcttttcttgtctaagaagagtttcttgtattttttttgtataaggattggcacccaaacttatacaaaaatgtacattactccaaataccataatttgaaaagaaagttatttccctatttacttcatgattaatgaaacctatcaacgtctctaaggccgtattgatatttgcgcctaaggcaaaacaatagtatatacccaatttattttgagggtacatacaagcaagcgacatcatgtcatttggatctaaacgtatattttcctgaaaatatgcatgatggatttcatcaacattacctaagtatacagccgtttttaaacgccaataatctaggtgaggaaatttcttactaagaaaacgaataggttttataagattaaactctatggcgatcttaaaccaaaattttaatacatatgtattttttatcattttttctttttcatctaaatttaagataaaacgattgtaaataaagtctatcaacacgtaaaaatcatggctatcaaaactgtcgagaatcgaaatattgtcataataaatatctatagctaataagaccttttgttgtttaattagatcaacaaacatattatacaaccctacatctaaaaattttggatcagctcctagttgaatacacagaactttcgtcctttccgtcttggcacatatgatgccataattaatgttggcaccccataaaacaaataacttgattagatcagtctggtttttcttcacagccctcaccaaggctctgtcaagctcatagctgtcaacatcagaacatgacatagagccactggttaccattttacattgtttacaaaaacctatgggtccgttttcccaccataatccaagctgctgtaaaataaaaatatcatcctcatgataatttgaaaaagccttgttttctatcaagactttttttgtaagaacctgtaaagaattcatcgtattatcatgaatgaaagcagtaaatgtaatcaattataaaattgacttattgaagagaaatgttaaatgagtgaaatcggtgtttatgatgatgtacatgatcatacgaagaaacacgttcactggtgtccatgatcaaaatttaatgttttacgtaaaaagtacagatgttaactgtttagtttaaacataaatttaacctttagtttaaaccctagttaatgatgtttaatatttcttctatactcattcagggaagtgtaatgattctaatactgttgttatggattattaatgaaaactttacagatgctggagggaataattttaatcatactgttttaatgtagctatataagctttcatcaaaatttaatttttttttataaaaatacacgaattaaactaaagtctaaactttagtttgactatttgagttaatgatgcttaacttatcttccatgcttatcaagggggggtcctaatagttttgatactattgttgtggattgttgaatataataaatactttatagatgctgaaatgtttgaaaataatagtacatcaatgttgtaagtttgatcaaaatttaatttctcataaaaaaggtacacatcaacattgctcatttaagtttcatgatgtttgattcattacttcctacaattactgggggggggggggtctttaatagctttagcattgttatggtttgctgactattatgtagaattcatagaagcacgtttagatagtaatatcactgcagtgtagattatgaaatacatactaaactaatttcagtatattttttttgttcatataagttaaggtacaaaaatgattaaacattgcaaaaaaagaaaatcacaatgctattatacatagtgatcatagtggcttgtatcatttctaaactagttccaaatgaatattgggcaatacatctattttttatcattatgatttttatggtatatatgtatgaaaagttagatatacatcaaaaatctcagttctggaattataccatgtcaggcttatctggacataacgtacaggtaacatgtaagtgttactaaatactatgaagtatctatttttttttgttgtaaaaaaaagaacttgatagtattttttaaaaaataaaataattaattgtacgtcaacttccttattttattctttaaaaataactcgtaagtattatttatctattttttgaaaaaatagatgtaatcggtttcatcatttaggtgtgtatttctttttagcatctatcaagaattcattgtttagtgatatgaaaacaatgaatgatcattatcttctatttaacaaccacctaaataaatgaacgtctttttcatcttaactgattaccaaaagttattttgcgaaaaggcatacatatgatcaatatcagacctacaatgaatatttccataatatccctttattgtaataattctatttttgcattccgatatctcatcatctgtgctattatatgtttccataactgtttcatcatcaaacataaatcctgttaaataggcaaaagactttaatcccggatagatttttaccattttcctgagagccgtgtatagcttgtaataaatggccaaaaatatgcaataaagcgtagaaagagagtaatttttggcataaaagattttgaaggtttgatgaatggctaaatcgcatataatataagatacgattttaaagcgcacctgttcacgcagatttgttgaaaaattcgtggaaagatttaacaaataaaaggttattaatagttgctcatcattccccttatacgacatcgtcagacgctctaatattttactactaggcacatctgccacatgttgaacatttaaagcctgttcttcttctgtgttacggcaaaagagccgtgcgtattcaggtgaagctccccaggataacaacgtccttgctacggctaaattttttttgacgatgacttttatcagaaataagtctttatttttgcattgatcactatgcgaatttgtatagttgacgccgttgcattgagtacattgatataatgttttacaattccagcgtagccctaaatggtataaaagaactgtattttcgacataagcatgctgattaacgatgtttttgagacaacacgtcgttaaggacaccatattgtctccaatttgttagataaaagtctttactaaaaaaatagatttttagttttaacaatcgagattttattatttggatgcatcatcaaaaagatttataagtataagaggttgtataagaaaaaaaatgatgttatactatttatgttaaaatttaatttatcatataaaaagtacagatttaatcagttggttaaactatttagttaattaaactaaatagtttaaccatttagtcagactacttggttagcaatgtttgagctttcttccattcttatccggggggggggtcctaatcgttctaatactattgtggatagttgaatataatgaagactttatagatgctataatgatgaattctagtatgcctgtataaaataattaacctttttgatcaaaatttaatttttttataaaaagctacagagtagtgttttattaaacgtggcttatttaaaagttacacaatgttaaaatctctacttactttaattctttgtggggttttattaactttatccatattatggcttactacttaccatgtagaacttatagaggcaatagatgatttctacgactgaaatatagaatagtccattttctatttgtaaaataatgatttatattctttcctaaaaatgatactttatatggtttgaaaacaaatattaacaacttgatttttttttctataaataaactataaatgaaaatagtaaaactcatagagtcttataagtgaacatcttcataatgttactcaaacgttggactattaaaaaatattccgtgtgcattattgcttttaatcagtatgattactttatacgaagccgctattaaaacgcttatcacacaccgaaaacaaattttaaaacaccccgatagccgtgaaattttactagctttggggttgtactgggataaaactcatattcttgttaaatgtcgtgaatgtgggaatatgagtcttaccggaaaacacagtacaaaatgtattaacattaattgtctacttattcttgccataaaaaaaaagaataagcgtattgttgataccttgataggaatgggcgcggatgtaacatatatacatcttttaaagaataagataaaactgtcatacaaccagctgtctatgcttaaaagcaactcgcagatttcattgaaggagcttcatgctatatgctatcttttatatggtcggcttcccaaaaaaattaaacaagggatgcgactgtgtaaaacaatggcgggactatgtggtgaacttttatgtgcatttttagctccgtaaatgataatatgtatttaaaacaaacagatattaccaaaatatattctatgtacataatatctgggaaattatttttttttctcatacccttaaatataaaaatattgggtttcttcactaaactttagaggtaaaaatttttctttgttttgcaccatcatgtatgggtttaggctgtcccagggattgtttatttgaatatttcctaaataggaacacaacgccatgatcatatatctttcattctggtaagctttttgatacatcttcaaagatgccgtacctccgagtgtgtaacagcaaacaaacgtccgtacttttccatgggtcgcagcccattccattccgtagctcagcatcttttgctgtatttttttattcgctttataaaaaaagtttttcatccattccacgttctcataaaaacaggcacttaaaaagagcactaggggtagtgtagtcttattatagaatgtaggaatgtatgttttagttatttttttcaacgcgtgttccatactatgttttaccgccataaaaatacaaaaccaataccaactttttctataaaaggttttgctgtacacatataaacgagcaaaatatatttcaaactctatattctttttataaaaaaactcgagacagtcgtttatgttacgactttttctaaatacctcaaaaacagtaattaattcactgtcgctgtggaaatgttcgtaagctaactgtttaatgtctttaggggtcaattctttttttgggagcagtggtttgagattcggcaaaggtcgtctaaagtagtgagcgaacttttcattcgctccccaacacaaaagccgataagccagcatgtagttatcacgttttaccgcgtaaataagcaaatagtttatattgatacatgtaccatgttgctgcccgtttggacatatgttgccgcattctgaacacttatgaatgagatcatagttcttacaacataaccccaaacgggttagtacttctttgtcacgttttaaaaactcgacatgattctttaatgttaatgctttgagcgcaatgttaaataaactctgcattttattaaaatgaggttagtatcatgttttagtataaaatttagcggctgtttacataatgctaaataaacttaacgttcctactaaaccaaaaaaaaatcaaattgactaagtcatagagaatttgacgatgttggtaggtaattttttaacatggtatatatttttttagggtcggttatattaggtaataaaagaggacgtgccgttaaagtattttgcttaagatcctttagatccttacaaaaatatagattgttcgtctgatgatgccactgtgttgcagtgatggcttgatcaatatcacctcccaagacaaaacagtagtatatcgttaaaaagttgtaatctttcatacaagccaactgcatcattttatcgatgtccatatgaacgatcttttgctcgtatatttcatgaaggtcaaatacattgttgaagtaaatggcgcacatgagtcgccacatactaaggtgcccatatgtttgatagaaaaaggagatagctcttttaagcttatattttactgctatggcatagcagtatttaacgaatacgttcatgggtacattatctaagatataaaatatgaaaaactttaactctcgatgaatctcttcccccatttcctgtacatttagagcttccaacataggatttttatcaaatatttcatgacataaaataatgttattgctcgttttatgacgcattaaaccggtgaaaatttccttattatttaaactatctttagctcctaactttcgacacagctcctgagtttgttccgtcctagcacaggtcagcccataataaatgtttgctccccactcggtgaacagccttattacgtcatagttattttcttttatggccatgattaatgccacatcaagatgaagaagttcccccttaaagggggttgagcttaaaataacgtaattacagtagtgacataagctaatgggcttgttttgccaccataagccacaatattttaaaatataatgatactcctcaggcacgctctgtttggccacagcctttttggccagggtttgcaaggagagcatgataacttcttgaaaaaaaaactcaaattaagttcctacttttttaaaatattagtatggacagatctaccatcatatgaaggaattctttcatcgttaaacactgaagagataatactttcatcgtatagagaatatcatgtcaatccatatattgaatgttatatatcattaaacccatcattaatatagtgtttatgtgctatggacaggttttttgaatgataatcttttaacatacgttttataacttcgggatcagtttcttttaaagataaagaatcattcatgttataacaatttaatgataacatgctggcaatgaacgagttgtctttttgatgcgctagagtctttccctcctcaaaggcattggcgcctaagtctatacaaaagaatatgtttccgatattatagaactgaatagaatgaaacatggcctgattgatatcagcccctaagacgacgcaacagtaataaatcgttaaatagttatagttcttgcgacaggcccactttagcatttcattcatgtctatgcgaatcctctccttttcgtacacttcgtgaagttcaaacacattattgtaaaaaagggcgcacataagccgccaccgatgtagatgagcatatctctgataaaaatagcaaatcgcctccttaaggttacattctattgccatcgcgtaccaatatttagtaaacatctcgcttaatatatcggtttctaccattaatccctccagttgttcataaatcattccctttacttcaaaacgatttatggtatctaaaatgggattattagaaaatacctcatggcagaaaatgatgttactgctagttagatcacgtttcaatgtgtaaaaaaatcgtaaaatttcctggtcatttaactgttctttggcacctagctgcctgcacaggtctcgggtgtgctccgtgttgacagaaagcaaaccgtagttgatgtttgcaccccactcggtgaacaattctattagatcgtgattgttttcctccacagctttcaccaaggccgcgttaagatttgtgccgttcttaaaatacggcgtccatattttcttttgatgatacatgatagggccattatgccaccatagaccgcagcacttcaaaaaatgaggatggcatttggccggatactggctggccagcacctttttggtgagagtctgcagagagaggaccatatttcttttttttgaaaaaatcaaattaaaaaaatcatgcttgtttagcatacatgtaatattgttataattacgttataattacgttataattacgttataactatattataacaatggtataacaatggtataacaatgttataacaatgttataacgatgtatcattgatgtcatcattcaactaggccaacatactttttaatttatagttttttaatagatgatatattttgctaggatctgcttcttttaacgttaatagcgaggagtctgcactataaatgtctaatgataaatgatgagatatcaaatagtaattccgttgctctgctagggcctttgcctcttcaaaggcgtcggctcccagatctatacaaaagaacaagttatccatattataaaatcgtacgcaggcaagcatagctgaattaatattagctcctaagagaaaacaataatatatggttaaaaaattgttatcttttgtgcaggccatccgcatcatttcatccacgtccatgcggatcttttccttttcatacaaattatgtaggtcaaacagcttattaaaacaaagagcacagattaaccaccacgtatttagatacttaaaatgttggtaaacataagaaatggcctccctaagattatcctgcaatgccactataaaacagtatatcgttaacatatcaccatccgacatattacttaatatgtcggtgtcttctactaaccttttcaacttccaatatatggatgaccttatttcccttataatgacataggctggaaagggattatcattaaaaagtttaagacataagataatattactgctagtagtgccagggtgtattaatttaaagaacatgtgcataatcttctttttatccacgcggtacttggctcctaattcccagcaaaattctcgaacaggcggcgtattggcgcaaattaacccatagttgatgtctgcgccccattctgtaaacagttttattaactgatagttgttttcctttgtagccaacattagtgccgtattaaggtccaagccgtctgcaaagcttggcagctttatcagcatatgtttgcaatcaagggaaattggggccttataccaccatagtccgcagcgttctaagataacatggtactcaatagatacttgctgtctggctagtacctttttggcgaaggattgtaaggaaggaaacatcctgtttcttttttttttaaaaatcaattatctttgttcataatcaagaaaaatccccatatttattgagtgataattttttaacatgcaatttattttttcagggtccgtaacgatcgacaacagagaaataaccggattgtaatgctttaatgataaggcatgggctatcagataattttccttttgttctgccaaagctttgccctcctcaaaggcatcggcacccaggtctatacaaaagaacaggtttccaagattatagttttgtatggaaacaagcatggcttgattgatgttggctcccatgataaaacagtagtaaatggccgaatagctataatcttggatgcaggctatgtgcatcatttcatcaatatccatgcggaccctttctatttcgtacagctcgtgaaggtcgaacacgttgttgtaaaaaagggcgcacatgagccgccacctatgtagacgcgggtatttctggtaaaagtagcggatagcatctttgaggtcatagtccaccgctatcgcgtaccagtatttggttaaaacagtgctaaagctatcatcatggtccagcatgaaggttatctccatgagccctcttaactcccacatgatttcccccctcagatccagattatctataatccttaaattggggttattggaaaacacctcgtggcaaaagataatattgctactggttttatcgcgcgttgtatcaaagaaaatttttaaaatatactctctttctaaatattctttggctcccagctctttgcacagatcacgggtattttccgtgagagcacaaatcattccatagttaatatctgcaccccattcagtaaacagctttatcaagtcatgattattctccttcacggctttcatcagtcctatgtttaactcgataccttgactaaaacaggttgaccttataaataatttattgcgtcgaatatgaagcataatggggccattatgccaccacaggccacaacacttcaggacatgatattgatctaccggtatacactgcccggccagtactttcttcgtgagggattgcagggaaggcaacatgcctttccatcctttgacggaaatcaaattatctactaataactatcagtgtttatattaagtatttagatattatcccgggctggatacgtagtatcgctattcacatgtacttccaactctagccggagcctgcagggtcatttatttttaatattgattcttttttgtatttaatcatttagagaaggtcatcataggagccagatgttctctctccagaacttatgtcgaaaaacattacctaaccgtaaacttcctgaattttttgacgaatatatattacaactgctgggattatactgggaaaaccatggaactattcaacgagcaggaaacaactgtgtgcttatacagcaacataccctcattcccgtaaatgaagccctgagaacagcagcatctgaagaaaattatgagatcgtgagccttttattagcgtgggaggggaacctttactatgctattataggggctctagagggcaaccgccacgacttaattcgtaaatatgatgaccaaatcaaggaccatcatgaaattctgccattcattgacgatccagtcatatttcacaaatgccatatcatgcggcaatgcttttttgattgtattttatatcaagctgtaaaatatagtaagtttcgcgttcttctttactttaaacatagattagaggatgatttgcccttcactcatttacttattgaaaaggcatgtaaagatcataattatgaagttattaaatggatatatgaaaacctacatatctacaatatgatagatacctttgaatgtgctattgcccataaggatctacatctatattgtttggggtatagatttatatataacagaatcgtacccgataagtatcatcatttagatattcgcatgctttcaagcctacaactcctacataaggtggcagccaaaggatacttagattttatcctagaaaccttaaagtatgatcataataaagataatataaatattattctaacacaagctgcaacctataaccatagaaaaattttaatctatttcattcctcaatcaacccacgcacagatagaacaatgtttactagtggcgataaaagcaaaatcttccaggaaaaccttgaacttactactgtctcacctaaacctttccatcaacctcatcaaaaaaataagccattatgttgccacttacaattcaacaaatataataggcattctgagtatgcggcggaaaaagaagatatatttagatatcatattgacaaaatttgtaaaaaaagctatttttaataagtttgtcgttcgatgtatggatacattttctataaacccggaaagaatccttaaaatagccgcgcgaataaataggatgatgttagtgaaaaaaatatctgaacatgtttggaaaaatcatgcggttagacttaaataccttaaacatgcggtacacacgatgaagcataaagatgggaaaaatagactcatgaactttatctatgatcgctgttattaccatatgcaaggggaagaaatctttagcctcgcaagattttatgcaatccatcatgcaccaaagttgtttgacgttttttatgattgttgtatcctagatacgatacgattcaaaagccttcttttagattgttcacatatcataggtaaaaacgctcatgatgctaccaatatcaacatcgtgaacaagtatatcggcaacctgtttgttatgggagttcttagcaaaaaagaaatcttacaggactatccatccatttattctaaacaatacatgccttagtttattttttttgcggccgaaacattattcttaccctagaaaacgcttatagtcatcttaaatcataggtaaggaagatcatcatattttttgaaacgtaattttttaacgcatgatctatgatttcagggtccgtgcttttaggcaacggggtggtggccggactataaatctttagggataaaatgttctttataagctcatacccttcccctaaagctgtagtaccctcttcgaaaacatcagcccccagatctatacaaaagaacatgttttctatattatagtactgtattgagctaagcatggcttgattgatgttggcgcccaggacatagcagtagtacatggttgaaaggttgtggtctttgatgcaggcgatccgcatcatctcttctatgtccatatggatcttgtccttttcatacgcctcatgaaggtcaaacacattattaaaacaaagagcacatgttaaccgccacgtattcaggtgtgtatatttttggtaaaaatactgtatggcctctttcaggttatagcgtatggctatagcgtaccagtatttgagtagtaatgtactgagcgaaaactcattatttagcagatcggtttttactattaactcccttaactcccagaaaatttctatcctcatttttatattatttactttttgtaatatcggattgttggaaaacacctcatggcataaaataatgttactactagttttatgaaactttagatctataaaaatttgtaaaatttcttcttcattcaaggtttccttggcacctagctctcgacagaggtcccaggtgtgctccgtgttgacagataccagcccgtagttgatgtccgccccccactctgcaaacagttttataaggttgtagttgttttcccttacagccttcactaacgccgtatttaggtttaagccctctttaatacctgctgattttatgagccttaggttatgatcaaacgtgatcggagcatcatgccaccataggtcataacactttaaaagataatgttggttcgtgggcacgcattgtccagccaacacctttttggtcagagattgcagggaaggcaacatgtctcttcatcttttaaaaaaaaatcaaattaattagccgaataaatttttctttcgagggctttttaaaagagctctttaagagctctttaagagctttttaagagattaaaaaattattcttgctggcattctgccaagtatgcggcattcctatcatctatagtatattatgagaatattcccaaatgatggataagttttttgatttataatcttttaataaactgcttatttcttcggggtcctttaagtttagtggcaaggaagcatctgagctgtaaatatccaaagccaaactatggctcagaaaattataacctttttgttccgctatggcacgaccctcttcaaaggcattaccacccaaatctatacagaaaaatatattaccgatgttataatattgtactgaagtaagcatagcttggttgatgttgccccccagcgcgtaacagtaatatattgttaatggattgttatccttggtagaagccagacatatcatgtcatggacgtctatttggatgttttccttgtggtacatctcatgaagctcatatattttgttataatacaggagacattttaatcgccattcattaagatccgtatatttctcatctagaaaacaaatggcgtccttacaatcgtattgtactgctttggcgtaccaatacttcactagtaaaccatttaactcgtccgtttcttttatttctatgagcccccatagtcttttataaattaagccccttaattgtataacaaatttgttttctaaaataggattattcataaaaatttcatggcacaaaataatactgccgctggttttattgtgcattatcctggtaaaaatacggaaaatatcgttgtcctctagagtttctttggcgcctagctgtctacacaactctcggatgtgcttcgtattgatagaaagcaaaccatagttgatatttgcgccccactctgtaaagagctttatcagactatagttgttttccttaacagctattattaatgccacacgaaggtctatatcttctcctaaaaatcctgattttatttgtattcggccacgatccatacaaagcttgagaggagcatcatgccaccataggccacaatatttcaaaatgcagtgttcatctattgacaaacactggctggctatcgtctttttgacgagggtctgcagagagagcggcaacgacatgtttctttttcaccaaaaaaaaatcaaatgttctcgtctttaaaggttaattcatgttcttaaaatgttcatttcatgatagtgattaataatatggtttaataacgctagaaggcttgtttataagacagtcataagcagtctataagacagtctataagcagtctataagacagtctatgacttagtctataactataatttctggatgggctgtaagatactcttcggctcgtttcagattttttgaagtatatgtctttagcatatcatatatttcctggggttcggttacatctaataccaaggtcacatcacggctgaaaagctgctttactaagaaaatgttgctcaagttatacatataagctttgtgcgcaatgagttgtgccctatcaaaatcggcagcccccaaatcaatacagaaaaacatgtttaaagtattattgttatagatagaaagattcatgccataatcgagactagcccccaacctatgacagtaataaatggccgcgtaatttttttcccgcaagcaagcaaatttcatcatcagattagggctgatgcaaatctctttttcacgacacaactcgtgtatgtcaaaaatgttattaaaataaaggctacaagctacccgccaatagaggtgatttttatgccttttatagaaatagtgaatagcctttgtaaaattatgtcgtaatgccagggcaaaccaaaactttgttaataggtggtgcgccgtatcccccgtcaacggaatgtttgaacaggtgtacgtaactgtgtctaaagtggttctagttacggtttccaagagtggattatgacaaaacatgtcataacccagcagaactcctgcacaggattttagcctggccacttcttttaaaatttccagaagacggggttcggatacaggcgttaagcctcccagttccgcacacagccgctttagatacacggcaggaacacgtataagcccatattcaggatttgcgccccaatccacaaataaacgtataagttcaagattatcgctcttcacggcctttactagcgccgcttcgagacaaagatcatcctcagaaaaacactgtaaatgtttatacgaaaaaacttgcttacaattgttacataggtgaataggacctaaatcccaccacaaaccaaaacgctgcaacgtataatcatagtcacttgaaagataattgcatgccacaacttttttggccaacgtttgtaaagacaacatactaagtttaaaacatcttaaatctaagctagctaactttcaagaaaaccctctatccctaagaatatatcttataactagacttatagcagtaaaaatcaactttggttattctttttaatataaaacgtctaattacttgcaaaggactataaagcccattttcctcagctagaatttttattttttaatgaagtagggggatatgttttcccttcaagacctttgccgaaagcatctttttattcttcccgatgtttttggcgagcatgtactacaacgattaggactgtattggagatgtcacggctcccttcaacgcataggagacgaccacatactcatacgacgggatctcatcctttccaccaacgaggccttaagaatggcgggagaggaaggaaacaatgaagtagtaaagctcttgttactgtggaagggaaatcttcattacgccgtcataggagccttgcagggtgatcaatatgacctgatccataagtatgaaaaccaaatcggcgactttcattttatcttaccattgattcaagacgcgaatacgtttgaaaaatgccacgctttagaacgtttttgtggtgtttcatgtctgctaaaacatgctacaaaatacaacatgctccctattctccaaaaataccaagaagagctgtctatgagagcgtatcttcacgaaaccctatttgaactagcatgcctatggcagaggtatgatgtccttaaatggatagagcaaaccatacatgtttacgacctaaagattatgtttaatattgccatctccaagagggatctgactatgtactccttaggatatattttcctttttgatagagggaacaccgaagctacgttgctaacgcaacatctcaagaagacagcggccaaagggctcctccactttgtgctagaaacgttaaaatacggcggcaacatagataccgtcctgacccaagccgtaaagtacaatcatagaaaacttttagattattttctgcgtcaactacctcgtaaacatattgaaaaacttttgttgctggccgtgcaggaaaaggcttctaaaaaaacattgaacttactgttgtcacatttaaactactccgtgaaacgcatcaaaaaactaccgcgctatgtgatagagtacgagtccaccttggtgataaagattttattaaaaaaaagagtgaacctgatagatgccatgttggaaaagatggtaagatatttttctgcgacgaaagtgaggacgatcatggatgagctttcgattagtccggaaagagtcattaagatggctatacagaaaatgagaacggatatcgtaatccatacttcttatgtttgggaggatgatctagaacgtcttactcgtcttaaaaatatggtatacaccataaagtacgaacatgggaaaaaaatgttaattaaagtcatgcacggcatatacaaaaacttattatacggcgaaagggaaaaagtcatgttttatttagccaagctctatgttgctcaaaacgcggccacccaattcagagacatttgtaaggactgttacaaactggatgtggcacggtttaaaccgcggtttaagcaactaatattagactgtttagaaattattactaaaaaatcttgctatagtatcctggaaatcttagaaaaacatattatttccctgtttactatgaaagttatgactgaagaagaaaaaaacctatgtttagaaatattatataaagtaattcattataaaacaatacaatgttaaaattcaatagatatccatcattaatattgattatattttcgaatattatcttctatggtgcaagataatcatctagcgcgtgaaacatgtcctcttctcttcaggaactttgtcgaaaaaagctgcctgactgcatacttccagagttttttgacgactatgtattgcaactgttaggactgcactggcaagatcatggttcccttcagcgtatcgagaagaaccagatacttgttcaacaggaacccatccatatcaatgaagcactcaaagtagcagcatcggaagggaactatgaaatcgtagagctgttgttgtcatgggaggcagatccccgctacgccgtcgtaggagccctagaaagcaaatactatgacctggtttacaaatactatgaccaagttaaagactgccatgatatcttgccgctgattcaaaatccggaaacattcgaaagatgtcatgagttaaacagcacctgttcactgaaatgcttattcaagcatgctgtgataaatgacatgctgccgattcttcaaaaatatacagactatctggataggtgggagtattgcagccagatgctgttcgaactggcatgtagtaaaaaaaaatatgagatggttgtgtggatagagggagttctaggcgtcggcaaagttacatctcttttcaccattgcgattagcaacagagacctacagctgtattctctgggctactcaattatccttgagaatttgtactcctgtggacaggaccccaagtttttactaaatcatttcctgcgagacgtttcaataaaagggcttctaccctttgtaatcaaaaccatagaatatggtggaagcaaggagatagccataactctggctaaaaaatatcagcataaacatattttgaaatacttcgaaacctgggaaagctaggttcagtatggtgtactcactattgtagtgaatcgtatcctgtaaattttgtaaaaaagcttaaacttttgaccacatcatattgttttagaaatctcaaaccagtgaacaacagtcttatcatacattaaaattccagtaaaatttatattttttttggtaaacaaatgttttctcttcaagacatctgtcggaaacatctttttcaacttcctgacgcttttgatgaatatatattacaagcgctaggactatactgggaaaaacacggatctcttcaacgaataagaaaggacgctgtgtttgtacagcgaaacatcgtcctttctaccaatgaggccctgagaatcgcagcctcagagggaaacgaaagggtaataaaacttctgttatcatgggagggaaattttcattatgtgatcataggagctctagagggtgaccaatatgacctaattcataagtatgatagtcaaattaaagactaccacatgattttatcattgatccaaaatgcaaatacctttgaaaagtgtcatcagttatccaatagtaatatgtggtgtcttatacagaatgctataaaatataatatgctccctattctccaaaaacacagaaatattctgacacatgagggagagaatcaggaattgtttgagatggcatgtgaggaacagaaatatgacatagttttatggataggacaaaccctaatgttaaatgagccggagtttatttttgatatcgccttcgaacggatagatttttctttattaacaatgggttatagccttctttttgataacaagatgagtagtatagacattcatgatgaagaagatcttacttcattaccaacagaacacctcgaaaaagcagccactaagggatgtttcttctttatgctagaaactttaaaacatggtggaaatgtaaatatggcagtcttatctaaagctgttgagtataatcatagaaaaattttagaccattttattcggcggcaaaaatgtttatcacgtgaagagattgaaaacctattattaaccgccataaccaattgtgcatccataaaaacgttaaacttactcttgtcttacctaaactattccgtaaaaaatatcattggaaaaatagtacaacatgtcataaaagatggtgattataccatcatattacttttaaaaaaaaagaaaataaacctagtggaacctgttttaacaggttttatagattattactatagctattgttttataaaacattttatccaagagtttgctattcgtccggaaaaactgattaaaatggccgcgcgaaaaggtaaactaaatatgattatcgaattccttaacgaaaaatatgttcataaagatgatcttggaactatatttaaatatctcaaaaccctagtatgtaccatgaaacataaaaaaggaaaagagacattaattgttcttattcataaaatatatcaagatattcatctggagactaaagaaaaatttaaattattaagattttatgtcatgcatgatgcaactatccaatttctatctatgtgcaaagactgttttaatttagccggttttaaaccatttgttttagaatgtttggatattgctattaaaaaaaattaccctgatatgatacaatatatagaaattctatcgaaatctgagtaaaatttatttttttgatcagagtaagaaaatgttctccctccaggagatctgtcgaaagaacatctactttctacctgactggctcggtgagcatgtgattcagcgactaggtctgtactgggaaaaacatggttctcttcagcgaatcggagacaactatgtacttatacaacaggacctcatcatccccatcaatgaagccctaagaatggcaggggaggaggggaatgatgaggtggtacaactcctattactatgggagggaaacattcattatgccatcataggagctttggagagtgaccattatagcctaatacgtaagctctatgaccaaatcgaagactgtcacgacatccttcccttgattcaagacccaaaactctttgaaaaatgccatgaattagataaatcttgtaacattttatgtctcgtattacacgccgtaaaaaacgatatgctttgcattcttcaagagtataaaatgcatctaagtggagaggatattcaagtggtgtttgaaacagcatgccgttcacaaaaaaacgatattgtgtcatggatgggacaaaatattgcaatatacaaccccgaagttatttttgatattgcctttgataagatgaatgtgtccttattatctatagggtatacgcttcttttcaatcatcatataaataatacgaacgaaaatattaattctttattgacacaacatcttgaatgggctgccggcatgggccttcttcattttatgctggaaactttaaagtatggcggggatgtaacgataatagtcttgtctgaggccgtaaaatatgaccacagaaagattttagattattttctccgtcgaaaaaacttgtaccaagaagatcttgaagaactattattgttggcgatacgtgcagattgttctaaaaagaccttaaacttgttattatcttacttaaactattccataaacaatatccgtaaaaaaatattacaatgtgtaaaagaatatgaaacgaccgttattataaaaattttacggaaaagaaagataaatctgatagagcccattttggcagactttataggatatcatagctatacctatatggtagattttatgcgtgagttttccatccatccggaaaaaatgatcaaaatggctgcacgagaatcgagggaggacttgatcataaaattttccaaaaaagtttgcaaagagcctaaagatagacttcactatctcaaaagcttagtgtatactatgcgacataaagaaggcaaacaactgttaatttatacaatccataacttatacaaagcttgtcatctagagagtaaagaaatgtttaatttggcacgattttatgcacggcataatgcagtgatccagttcaaatcgatttgccacgatctctccaagctcaatattaatatcaaaaacttgttgttagaatgtttaggtattgctattaaaaaaaattactttcaacttatcaaaacaatagaaacggatatgcgttatgagtaacatttttagatgagggaagattctaccaaactaactaagacctttcgctagaatgtatcttattgttaatatagatgagatatgtcattgtgaaaaaatagattaggtaggttgtgaaaaacagattaaacttaaaattatgtgtattatgtaaaattttagaaataaaaatttatttttttttattgagggtacggaaaatgttctccctacaggacctctgtcggaagaacattttcttccttccaaatgattttagcaagcataccctacaatggctgggattatattggaaagagcatggatccgtccatcgagcagaaaaagacagcataatgatacagaatgaattggttctttctatcaatgatgctttacagcttgcaggagaggagggggacacagatgtagtacagctcttgttattatgggagggaaatctgcattatgccatcataggagccttgaagactgaaaaatataacctaatatgtgagtatcatagccaaattcaggactggcatattctcctacccatgattcaagatccagaaacattcgaaaaatgtcatgatttaagccttggatgtgactttatttgccttctccaacatgctgtaaaatacaacatgctttctattcttgtcaaatataaggaggatctactaaatgcaaggattaggcatcgtatccaatccctgtttgttttggcatgcgaaaatcggagaattgaaattattgattggataggccaaaatctgccaattcctgaacctgatgccatttttagcattgctgttgctacaagagatttagaactgttttccttagggtacaagattatttttgattacatgcaaagacagggaatcattcaattaaccaatggagttcgcatggttgtgctaaatcgtcacattagcatggcaatagataatggtcttttaccttttgttctggaaactttaaaacatggtgggaatatacatagagccttatcttatgcagtaacacacaatagaagaaaaattctggattatcttattcgccagaaaaatatagcccctaatacaattgaaagacttttatatctggccgtgaaaaatcaatcttccaggaaaactttgaacttgttgctatcttacataaattacaaggtgaaaaatgttaaaaagctggtagagcatgtagtaaatgagaaatccactcttgtgttaaaaattttattagaaaaaaaggaaaatctagtggatgctgttttaacaagacttgtaaaacattctacatatttccaggtgagagaatttatccaggagttttccatcagcccagaaaaattcattaaaatagctgtgcgggaaaagaaaaatgtgttaatcgaggctatttctgaagatatttgggaaaatcccacagaaagaattacttatctcaaacagatagtgcacaccataaaatatgaaagtggaaggcgatttttggtagacatcattcacagcatttaccaaagttactcactaaaacacgaagatattcttaaactggcaacattttatgtcaaacacaatgcaatcacccattttaaagacctctgcaaatatctttggctgaacagaggaacagaaagtaagaaactgtttttagagtgtttagaaattgctgatgagaaggagtttcctgatattaaaagtattgtgagtgaatatattaactacttgtttactgcaggagctattaccaaggaagaaatcatgcaagcctatgatgctttagagtagccatgtattaacattctgaaagtagaataaaatatactatatactaaaaaccaaattagccatttttaactatcttcttcttaaaaactctggataaaaatttatttttttttaatttgggtagggaaaatgttctcccttcaggacctctgtcggaagaacaccttcttccttccaagtgattttagcaagcataccctgcatttgctggggttatactggaaggggcatggatctatccaaaggataaagaatgatggtgtgcttatagagcatgatcttactctttccatcaatgaagccttaattcttgcaggagaagagggaaacaatgaagtagtaaagctcttgttactatgggaaggaaatcttcattatgccatcataggagctttgaggactgagaactataacctagtatgtgagtaccatagtcaaattcaggactggcatgttctcctccctttgattcaagatccagaaacattcgaaaaatgtcatgatttaagccttgaatgtgatctttcatgccttctccaacatgctgtaaaatataacatgctttcgattcttgttaaatataaagaggatctactaaatgtactatttaggcaacaaattcaaggactatttattttagcatgtgaaaatcggaagcttgagattcttacgtggatgggtcaaaatctgccaattcctgatcctgagcctatttttagcattgctgttgtcacaaaagatttagaaatgttttccttagggtacaagattgtttttgaatacatggaaaaccaaggacttcatttaacccaggtagttcgtatggttatgctaaatcatcactttggcatggtaataaataaaggacttttaccctttgtgctggaaattttaaattatggtgggaatgtaaatagagccttatcttatgctgtcacacaaaataaaagaaagattttagaccatgttgttcgccaaaagaatataccccataaaaccattgaaagaatgttgcatctggctgtaaaaaagcatgctcccaggaaaactctgaacttgttactatcttacataaattacaaggtgaaaaatgttaaaaagttgttagaacatgtagtgaaatacaactctactcttgtgataagactcttgttagaaaaaaagaaaaacctgctggatgctactttgacaagatatgtcaaagattctacatactttcaggtgaaagaatttatgcaagacttctccatcagcccagaaaaattcattaaaatagctgtgcgggaaaagagaaatgtgttgatcaagggtatttctgaagatatttgggaaaatcccgcggaaagaatcaggaatcttaagcagatagtgtgtaccataaaatatgaaagtggaagacaattcctgataaatatcattcacaccatttaccagagttattctttgaaacctgaagaaattcttaaattggcaacattttatgtcaaacacaatgcaaccacccattttaaagatctctgcaaatatctttggctgaacagaagaacagaaagtaagaaactgtttttagagtgcttggaaattgctgataagaaggagtttcctgatattaaaagtattgtgagtgaatacattaactatttgtttactgcaggagctattaccaaggaagaaatcatgcaagcctatgctttggagtatgccatgtattaaatttctgaatcagtaagcaatagatagattttagaatatgctgtattaagttagtttctgaataagtaattaatagatagattttagtttatgtaaaaatgttaacatttgttcataagttttagataccattttagagttacttttttagatattactattttagccattattatcttaaataatcactattttagataggtccccgtattaaaaaccaaattaaccattatctatgtttttaataatactttttaaaaaccctccataaaaatttatttttttttcataaaagtagagaaaatgttctccctacaggatctctgtcggaagaacctttttcttccacttgagcccttaggcaagcatgtggttcaacggctgggattatactgggaaggccatggttcagttaaacgagtgggtgattgctttatatgtgtagaccagatttggatgctatcaatccataaggctatacaaattgcagcctcggaaggaaatgagaacattgtcaagcttttcttactatggaaggggagtctacaatatgccatcataggagccttagagggcaggcaatatgatctgattcaaaaatattacaaccaaattggggactgccatcagattctaccactgattcaagatccagaaatttacgaaagatgtcatgaattaaatgttacatgtacctttcaatgcttatttcaacatgctataagagataacatgctgcccattttccaaaaatatggagaagatctgaatggaaacaggagaatggttcaacttctgtatgagatggcatgccgattacaaaattatgatatcatcaaatggataggatctaacctgcatgtttataacttggaagccatttttagcattgcttttgttagaaaggatttaactttgtattctttaggctacatgcttcttctgggtagaatgagtactgaagatagaaactttatctcaatcataacacgccatcttgaatacgcatcaaaaaagggactttttgactttgtactagaatctttgaaatatggaggtcaagtggatacagtgttgtttcaggctgtaaaatacaaccataggaaaattttggcccattttattcatgaaattccccgtgaaacggttgaaaagctgatactccatgctgtggagtcacgggcctccagaaaaacattcaacctgcttttatcttccataaactactgtgtgaacccttttgtcaaaaaactactgcacgctgtggtggaacacaagtacatgcttatcataaagcttttgctcgagcggcccaaaaagaagataaacctggtagatgctgctctattcaaacttgtaaaatactctacttatacagaaatagtaaaatacatgggtgagttttctgtggacccaaaaagggtggtcaaaatggcagcacgactcatgagagtggacctgattaaaaagatttctaatgatgcatgggaagataaactagagagaatcaagcaccttaaacagatggtaaataccatgaaccacagaaatggaaaaaatctattgatgtacaatattcacaatattactggatatacctatctgaacaccaaagaagcatttaacttaacaagattttatgctgtccacaatgcaacatgtttgtttaaagaaatgtgtaaaagctgttttgtacatgataaaatacagctcagagaattgcttgaagattgtttacatattgctaataggcatgattatatccagattgcagaaaccgcagatgaatgtatcaaatatatagatcttattacatttaagtaaaccatgtatatatcaagtaaatccagattaaatcaggctaattgtaaatagttgtagataccatataatgaatgttttattaggatagtagttcagttaagatagtagtttagttaagatagtagtttagttaagatagtagttatgttaagatagtagttctgttaagataatagtttagttaaaactagttcatgttaagttaatagttttgttaagacaatagttcatttaagtcaatagttcagttaagtcaatagttttgttaagtcaatagtttagttaagtcaatagtttagttaagtcaatagtttagttaagtcaatagttatattaagacattagttctgctaatacattagttttgttaagataataaaaatttatttttttttcatcagggtagagaaaatgttctccctacaggagctctgccggaagaacatttacattcttccttaccccttggctaagcatgtacttcaacaactagggctgtactggaagggacatggatctcttcaacgaatcggagatgaccatgtactcttacagcaggacctgatcttttccatcaacgaggccttaagaatggcaggagaggaaggaaacaatgaagtagtaaagctcttgttactatgggagggaaaccttcattatgccatcataggagctttagagggcgaccgatatgaccttatccataaatattatgatcaaattggggactgccacaagattcttcctttaatccaagacccgcaaatctttgaaaaatgccatgaattgagtaactcctgtaatattcgatgccttttagaacatgcagtaaaacacgacatgctttctattcttcaaaaacacaaggagcaaataagattacacatggcattaacccaaatactatttgaattggcgtgtcatgaacgtaaaaatgacatcattagatggatcggttattccctgcacatacaccatctagagactatttttgatgttgcattcgcccataaaaatttatccttatacgttttagggtatgaacttctcatgcacaaagtaaatacagaggctgcatatatagaattacccaatttgctatcatatcaccttcgaactgcggcggcaggaggtcttcttaactttatgttagaaacaataaagcatggtggatatctggataaaacggttttatccgcggctatcaggtacaagcataggaaaattgtggctcattttattcatcaggttccccgtaaaaccgttaaaaaactgttactctatgctgtgcaggctcgggcccccaaaaaaacactgaacctacttttatcttccttaaactactccgtgcacaccatcaccaaacaactcgtacacaatgtcgtcatctacagttccacgcttatcgtaaagcttttactcatgcggcgaaaaaacaagttaaacctagtagatgccgttttagccagacttgtaaaatattccacctatacagacattgtacaattcatgggtgagttttctgtgagcccagaaagggtgatcaaaatggctgcacgggaatccaggacctttctgattgaaatgatctccaaagctgcttggggaaatcacccacagacgttgattcatcatctcaaacaactaaccaataccatgaagcctcaatctggaaaagaccacatcatatataccatccactatatttatctaaactctaatatgctggtagcggaggaggaaaaaaatatttttaaattagcaaaattttatgcgaatcataatgcggtaaacaggtttaaacaaatttgtgaagactattatatattagatgcacgatttaaaacacttattttagaatgttttgaaattgccgtccagaaaaactatcctagaattgcaaatattgtggatgactatattcgattccttttttacaggggaaatataaccgaggaagaaattcgtgaagcctattctttaaaagatgctgaggtttatgtagatttaaaatggttacaacaaggagaaatggtttaaaccaaatccggtttaaactaaatccaatttaaactacatttggtttatcattagtcattgaaaccatcgaaaaaaaagctatttgtttatccccataaactcatcttttttttgtctcaaagtttgacactaaaattcagtgttttatagtgtttataattaagtgttttgcatgcattgcagaaattttcatcttttttaattggttcaataccacatgtcatacaatatgttgtttgattatcaagattaactttatgaaaggaaagtaagtgagccgcaaatttaaaagtaaaatatctttcatttaaaatgatcttatgaatgtattttcgataaggaggaatgaaagcatttgccaaaataaatcgcataaaaggcttggaaaaacccatatcttctaatcttttgtgggtataaaccctattttggtgttttacaaaaacttcattgttataatagtcgttatagctatcaatcatttttttaagtcctataatgcccaaggttgcacgcataaagccacagtttctgctccaaaaagcatgcacctgtaaagggtgcttttcatataaccaattacaaaatttcattccgcaacagtagcatgttatttcagtgggggatgtatagaataatccggcattcgaaaatttttcataattttttatgtcatggattgcgaagctttgatttcgtgcatctatggagctatagcctacatatttaggttttacttcaaataatcgcaaagagatgtatggatctatcgtatttattttaggaaacatttcataattttaaattcttatatataatataaaaaaaattacaaacatttgtaatgatcatcctcaattgaaggctgagttgtaggctttatttttctaattatacgaagaaggtaggttctcataaagccttcaagatgactattgatgtttccaatacattttctcaatgagttcataaacccagacattttgctaatggcttggcaaagtgccaacaagttgtccacaaagtactggtagattgccactagctatagctagctatagtgagccaacctctctgtatgtattttatatatttcattttttaatagatttaatatttttataaaaaaatatttagttttttatacaagaatgtcgacaaaaaaaaagcccacaattaccaagcaagagctttactccttagtagcggcagatacccagttaaataaagcattgattgaaagaatctttacaagtcagcaaaaaataatacaaaatgctttaaagcacaatcaagaagttattataccacccggaatcaagttcaccgtcgttacggtgaaagctaaacctgctcgccagggccataatcccgccacaggagagcctattcaaattaaagctaaacctgaacataaagccgtaaagatacgagcattgaaacctgtccatgatatgttaaactaaactataaagtcatattcttctttatcgttattatcttcaatatatttttgccaatcgaaatcgaataaattcagatcctggacatttaaatacttatcatcgtacattttaatataatttaaacatgagttgttgtcaaaaacttttagcgtttttgttaaaattatcatatgaataatttccttattaagagttgccggaataatacaaaacctatttttaggtacatcatccatgataatagtaaaattagtaaaaattgtttcttgtttttcttttgtttcaaataaacgttgtaaggttaaaggtttctcgttcaatggtttctttgaagataaaaagaatgtataatctggtttaaaggtatttttggtttcaatcgtgattccatctgcttgagcatatactaaaccagaccaaatataacggtccactattacaatataatttagcttaagtagcactgcaatttctgcgataaattcactacgatgttttgtaaataatttatgtaattgttccgatgacatttctatggttttatttaacacctgcaatataagatcaccggtggtcgtgtctggattaggaaaatgtatacatatagcattataatccatgcattccaatgtttcttttaatttcattgcctgtgtgctttttcccacaccattgattccctcgatggcaatgagtattccacgcatgattaataaaaggaaaaaaagaattcagtttttaacatttcttacaaatctttttttatacaacattgtacaacactgcattagcggtatatgatgttatagcttcattaaatatttgcttttatataatctttaccaacctatatttggtagatcactgcagatggtcataaataggccataactaagataaaaattatttcagacgctactacggtagtattattaaaatcatgtgtggcaatgtatgacgtcttaatagataaaacatttaaggaaaacaaatttgaataaaaaaaataattgttatgatggcgttgttacacaaagaaaagcttatagagtgcatctatcatgagctagaaaatggcgggacaatattgcttctaacaaaaaatattgttgtgtcagaaatttcatacattggcaatacttataaatattttacctttaatgacaatcatgatctgataagcaaagaagatcttaaaggagcaacatccaaaaacattgctaaaatgatttataattggattataaaaaatcctcaaaataataagatttggagtggtgagccgcgtactcaaatttattttgaaaatgatttatatcatacaaattacaatcataaatgtataaaagatttttggaatgtttcaacttcagtcggtcctcatatctttaatgatcgtagcatttggtgtactaaatgcacatccttttacccatttaccaacattatgtcgcccaatatattccaataaattagatatctttgctattaaaatagttaaaaaccttataggataattaggtactttattacgataaattatgatattttataattagttactttattataattaatctctttattaatgaattatcataagataactaattatttttttccatatatcagataataaatctgatatgggctaaaagtatgtttcaaactatttacaatagaatttctgttaagaaaacatacataatttgaataaaatttttttaaatatcaccgaaacaatcaacatggtgttaatagagtttttaacaggtttcttctatttatatggaaagagactgttttccattagtaaagtcatggacatgatatgtctagactattataccattattcctgctcctctggcgatgatgttagcggcaagactaaaaaactatgacctcatgaaacgactgcacgaatgggaaatctctattgactacgctctacttgtagtagatgatgtgccgtctattgactattgcttaagtcttggcgctagatccccgactagagcacaaaaaagagaactgctgagggacaacacgtttaatcccgtgtataagtatcttatgaactgttccggcttcccaacaaagagagaaaaaaacattccttgtgatgttcaatgcgaaagactgcaaaaaaacattataaaagaactggtatttaactgctctgtactgcttgaaatggtactgcacacagaaagagaatatgcatacgccctacactgtgctgcaaaacataaccaattgcccatcctcatgtattgttggcaacaatccacagacgcggaatctattttgttgaaaacctgctgttctgataagaacatcaattgttttaactattgtattctatatggcggcgcccaaaatttggatgctgcaatggtggaagcggcaaagcacgatgcccggatgctgataaactactgtgtcatgcttggtggaagatccttaaacgaagcaaaagaaacggctgccatgtttggacacattgaatgcgcacaacactgttttaaactgcagtcttacgtcgtggacacatcgaatacagacgacactgattaaagcgacaatcttacgtcatgaacgactgtcttttgagtatctatacttacattatatttttttatgaaaaaaatataaaggttgtatacaaacctttgtatacaagaaatttggatcattaaacaataattaatttggacacaggaaacgatctagatcgatcaaaaagctattttttttgcacacagaacatttagataattgagagattactttccatacttgttaagcttttttacacacaggaactttggattctgttcaggaagtttttcatagacattatgtttacagccagtaataataattttgggctttttcttaaaccaccggtggaaaacatccagcttgtaaagagggaaatgcatgtagagaggttttggtagtcatggttaagagatttgactaactccatgtttcctgtaaagactgcccagtcccaagcagtaaaacctctatgatagtctttttgagtcggatctgctccaaattttatgagagaaagcatatttaaagaacggccccgtattgcggccttcatcacaggagtcatcccattaaaattcggtaaacaaattctggtcccattttttccgaaatagcccaacaccccttccaggattaaatgattttttttctcagctaaataatgtaaagcagagtttccatctttatccctcctatgagggttaattatttctccaggataagattcttgttcaaaaagaaattttaaaaagtctatacgtccgtagatgcatatccacatgaataccgaggatccatttttatcgcatctattgacaatccacggatctgttttaaaaaattcctcaaatagtgtaagattcccatttctaatatgttttttaatccatttaacaaacaagttttctatctccctttctggaaacatgtgttccattttgaatgtcgcccctactccactatatgattttactcctttaatttttaatgtccttttttttcggacttctttggataagctgtttattaccatctttaaatgccttatagcggggaggagccaggcccttttcccatatgtgcggtaattcttggtgtttatgcttgcctttggcataaccaggccagtatttttcgatatattcagggtttgtttttacgtattctttaaaggtccgataggcttcttgaatacaggtaggctcaccggtataatttccatgttcatcttcctttaaaaagccattaaccctgtcctttctccacttaagattgtgctttccaaaaatgcgatcaagatcttgcgcctgctggggtggaatcataaatccctttttaggtcgaagctttttattttttccatagcttcggccatcgcgttgcgaaacagtggttaggacgcctgatagtctttccatgggcgtcgcatctaatcctatccatccaccctgatgaatatcaatggcaacaagctctcctttattttgggcaagccaagtttccaagaatgccatgctttcttcccagggataaggcccgccaacaccacgggttgtccaatcttgcaaggactccaggtccgacacctggtaaggctctaaagaagacggttccttgtttttgtactgcaaataagatttaatgacccatttataccatgtgtcgaaccgcagcgtggcgcctccaaagtgaaagccgtcgttgattttaggatatctgcaacatatttcaaccgtacgtttgagttctgcaaaagcggccttccaaggaagtctttcgctgcgggtaagacggtctattttgccctgcgtgccatagcgtatggcatgtcgtgccaattgcaacaattctgacaccgatccgtgggccccgatccagtttatcggataggcaacctccgaagggtttaaaagatgctcgtaaaagcgtggatcttcagatgccaaggcgtctgcaaaggggataatgctagaaaacctgtctagacatacgttttctgtgtttacttctaaaggtagaaaaatggttgcgtgaggcttttgaacctgcttgttcagcggtctgcatatgctttgaataatgtctctaggactatgtcgcggcgctgcaaaaaataccgcgtttagttctggaacctctacgccctcttgaaagagtcgacagtttaataaaataacgggttcctttgaggaacaaaattctgtaaatgttttgaggataacctgtcgcggcagggttgagtgagctatcagggcatagaccccttggtctaccaacgccgcgtatagctccttggcctgtttaatatcacgggtaaataccagcattttaggagccggtatattggtttttaaataggctaaggccattataatttgctttactatgatctgtttcgtggtctcctctttggtactcggttggtgggccaatttaggcgcggctaccatctgcaattcaaaatcatttacatagccggcctctatgccttctcgcagatagtagcgaaaggcaacgccgccaaaaagttcacgatttttcatggaaagcggggtgtcgtacctgggcgttgccgttaaaaaaagtcggtgcccttttttaaagttgagcaacacgtgggtaaagggccgtgtctcccattcgccgcaaatccggtgacattcatcgctaataataagatcgaaatcatccaccagtagcgtggaggattggtaggtggcaatcacaagaagagaaggggcctcccgtatccgttttgcaataaagacaggattggtggtcatttctatattgtcgtgatttagcacaatgcgggtctggtcagaccccacaagcaaaacgttcttcaaagaaattccatactgatagagtttttccagagtctgccgtagtagggacaggcccggcaccaggtacaaaacttttccttgaagataattggagaggataagataggcgacgcgagttttgccgcatcggcaggccatctgcagaatggccctcccacttcgccgcagctcctgatagcccatattggccgcctccttctgataaagtcgatcctcgattgcagtccgtgtctcatctgtagaaaaaaataatacgtcatctgcgaaatgttcatcttccacaggagttatcaccaggtgtctcagtttctccttgcttatcagcggatcagagggcaaagatggctcaaccactatcgtggaatcattcatctcataggcgggagaatcacacaaagtatagcttatgtccagacagtttgcaacatcctcagccaattgttttattttttcgggtaaaagacatacgagttctttgtttttgacgcgaaaaaactgtgcacaatataacacccctgcttcaattttttgcgcatccttctttgtagatgtttccaatgtgaaacaatacttccattcatccgtaaaacaggttgtataagatccatcatgaagcctagcggccaagtttcctgtgtgcccaactttatgtaaggattgggcctccagccagggatgaaccgccacgtaaaatcctgcgcacatgctatatcaaattgcagtttcttaataactgtacacaggatctgaaaaacatgtgattacaaaatttagataagaaatatttaatattaaaaatcacagaatacatgtcactgtgtagagagaaagccaaaaactcctcttgaccgccgtgggaaatcatccagggtagtaggttgtgtttcataaagttgtatgccgtagtgatcaccgtggactccagatggttattggcatctttgcaatactttgccatcttggcagaaaagacgataaatccacaaattctaccccagttgataagatccttaaacagctcagtcacaaccccagtaaactgggttttaatttcttgaacactcgtaagagaaaaggtaattgtaacctgtttgttcaaacactcatcataataggttaaaattttttttatttgttgttgatatgggctaagctcatgctctgaaatatcattaatgtaatatttaatatatcccactagtatttcattaatgatattatgatatattaactcttctccctccatagcggcaccctatatttttttatttaggtttcaatgttatcacaattgcgatacaattgtgatacaattgtgacacaactgtgttgtatacaacaaatgttaggccacgtatagcaacctatatgttaagaaatatttttatcccaacattagttggaaacgagcagccgcaaagaagtcatttaaaataagccatttaaagatttagaatttatatgtatacaactgtacaatggaagcagttcttaccaaactcgaccaggaggaaaaaaaggctctccaaaattttcatcgttgtgcttgggaagaaactaaaaatattataaacgattttcttgaaatccctgaggaacgatgcacctataaattcaactcatacacaaaaaaaatggagcttttatttacccctgaattccacaccgcctggcatgaagttcctgagtgcagagagttcatattaaactttttgagactcatttcgggacatcgagtggtattaaaaggccctacatttgtttttacaaaagagatcaagaatctgggcattcctagtaccatcaatgttgactttcaggccaacattgaaaatatggatgatctacagaagggaaatctcatcggcaagatgaatatcaaagaaggctaaataaaacaactaacatcaaaaaacattaaaggctatgttgtggacgatgcctttgtctcaatagtttcgaggtcatccaataactcatgtaacgtaaaaaagttggtccatttttttgaaaacattaaaagacgttcgtcttcataaataaaaaagtcattcgaaggaaaaatgatatactcaataccatagtcttgtaatattttttttaggtctctcagggtccagggatttaccaggcttctacgcgaagtgagcatcataaaaatatctaatattttttgcgccataagccagcgcggattctcattggcccacaaatcaacaataattctcttatcaaccgtgagcattcctacttgattcgaagaaatgattagatgcccagcagtccaccccatgagtagataacgcagcgttgtagaaatgtcacatatggaaggcattcctccacaacatgaacccaaattaggatgcgtgtgaaacacaaacatagcaggcttgttggccaccctgctataaatatcagcaggcatcatagcctcgctgccaaaataaatgttctctcctgccctataggggcttggaatgatttccactatctcgggtacaccgtttatcatattaatgcggccgcaccattcacggtcatcgtccaaaaattttttgatggcaccccgaacattgtcccagttaagcaacagagtattcacaatctcattacgctccgcccagtattccttaaaacttcttttagacttgctgagctgttcccaggattcgaactcagtccaatgttttttttcttttggggaagacttcccttttgaaacattttttgcggctccaccatctacactatgattttccaaaataatctccttcatcgtttgagttatatgggcattgctaagcaccttagtggtaacctgtttacctatgtgatttagcagaaaaccaagtttgtccatttgtgtctcaaccatttattcttaacaaaacaaaaaaaaattaaaaatcatcgtcgtttaaaaagagtttgaaggcaaacgcatcatccttaacacagttctgatactgcgtaggtcttaactcgaaaaagttggttttttctacttcattaagaaagaatttagtcatctgaggaaaagggtttcccaccttataaatgcttttgcactgcatcatgaagcacaaattatctgtaaagtagcgtatatattgaaatagcatttcttttgaaaaaccgggaactcttcctcttgccttgtcaaaggcatagttaataaactcatccaccaactccacagcctccttcaaaattttgtgaatgatcttttcctcgggaatgttatacacgtaatttgagataagaaaacacgcaaaactacagtgcatcccttcatcacgtgagataaactcattatagcttacaagccccggcataatattctgttccttaagaaactggatcgccacaaagtggttttgaaataaaatgccttctacggcggcgaagcccaccagccgctcacctagagtgttcctgtcggggtccatccactgccgcacccactgcgccattttttttatgatagggtgtttttcaatgccgctaaagatgcgctgttgttccttctcatccgggatcagcgtttttacctgtattgagtaggcttcgctatgaacgcactcttgggcagcctgcattgtataaaagtataacacttcctttactttaatttcgcgcataaaattggttaaaaggttttcgataacaatttcgtcggcaacaacaaagaaggctaaaatttgtttataaaattcgcgctgtggctttggcatggcttcccaatcatcaatgtccttacacatgtccacctcctgcgccgtccacgtcaaactttctaattttttataccagttccaacattcggggtgctgaataggaaaaatagtgaaacgttgggaattttcaattagtaattcctccatatttgaaataaatattaacatcttcaaatttattggctgccatggagacgttttttattgagacgttggcatctgatgtgtatggaaaggcgttaaatgttgatttagatagactatcgcaggcgcaggttaaatatacccttcaagagcttatttcctactgcagcgctctaaccattttacattatgactattcaacccttgcggcgcgtctttcggtgtaccagctgcaccagtcaacggcctcctccttctcaaaggcggtgaggctgcaggccgcacaatcctgctcacgcctgtccccccagtttgtggacgtcgtttacaagtacaaagccatttttgacagctacattgactatagcagagattacaagctgtccctcctggggatagaaaccatgaaaaattcttatttgttaaaaaataaagatggggtcatcatggaacgcccgcaggatgcttatatgcgggttgccatcatgatctatgggatgggaagagtggtcaatatgaaaatgattctgctaacctatgacctgctttcccagcacgtcatcacacacgcgtcgcccaccatgttcaatgcaggcaccaaaaagccacaactctccagctgtttcctgctaaatgtaaatgataatttagaaaatttatatgatatggtcaaaacggccggcatcatttcaggcggcggcggtggaatagggctgtgcttgtcaggaatacgggcaaagaatagttttatttctggtagtggtcttaaaagtaacggcatacagaattatattgtgctgcaaaatgcttcacaatgctacgcgaaccagggaggcctacgtcccggagcctacgccgtctacttagagctgtggcaccaagacatctttacatttttacaaatgcctcgcctaaaaggacaaatggctgaacaacggcttaatgcccctaatctcaagtacggcctatgggtccccgacctattcatggaaatacttgaagaccaaatacacaacagaggcgacggcaaatggtacctcttttcgccggatcaggcccccaatctacataaggtctttgatttggaacggtcgcagcacgaaaacgcacaccgcgaatttaaaaagctttactatcagtatgttgctgaaaaaaggtacaccggcgtcacaacggccaaagagattatcaaagagtggttcaaaacagttgttcaagtagggaatccctatatcgggtttaaagatgccataaatcgtaaaagtaatctttcacatgtaggcactatcacgaactccaatctttgtattgaagtcacaatcccctgctgggagggtgataaggctgaacaaggtgtttgtaatctggccgcagtaaatctagccgcctttatacgtgaaaatggctacgactaccgtgggctcatagaagcatcaggcaatgtcacagaaaatttagataatattatagataatggctactaccccacagaagccacgcggagaagcaatatgcgtcaccgacctattggcatcggggtctttggcctagccgacgtgtttgcgtctttaaaaatgaaatttggttcacccgaggccattgccatggatgaggccatccatgcggccctatactacggggccatgcgacgatccatagaacttgcaaaagaaaaaggaagtcatcccagctttccggggtctgcggcctcaaagggtctactgcagcccgacctatgggttcgctgtggtgatttagtttcctcctgggaagaacgcgtggcacagacgacgcagggtgtgttgacgccgaaaaggtggtcgcagctacgcctggcggctatgcagggacttcgaaatggatatgtcacagctcttatgcccaccgcaacctcctcaaattctacaggaaaaaacgaatgttttgagccctttacatccaatctatatacacgtagaacgttaagcggggagtttattgttttaaataagtatttaatagacgatttaaaagaaattaatctttggacagaagccattcaacagcagctactaaatgcgggaggtagcattcagcacattttggatataccggccgagatccgcgatcggtataaaacctccagggaaatgaatcaaaaaattttaacaaaacacgcggccgcacgaaacccctttgtatcccaaagtatgtccttgaactattacttttatgaacctgaactaagccaggtacttacagtgctcgtcctaggctggaaaaaaggtttaactaccggttcctattactgtcattttagccctggagcgggtacccaaaaaaagattataagaaactctgagaaagcgtgtaatgcggactgcgaggcgtgtcttctgtaggtgtctcgcggtaaaagagcagcggggaccatatggtaaaccccaacaagaggataatgaataaaaaaagtaaacaggcatccattagttccatattaaatttttttttcttctatataatggaatattttgttgcggtagacaatgaaacctccttgggggtttttacttctatagagcaatgtgaagaaacgatgaaacaataccccggcctccattatgtcgtttttaagtatatgtgtccggcggatgcagaaaatacagatgttgtatatttaataccctcgttaaccttgcatacccccatgtttgtagaccactgtccaaatcgtaccaaacaagcacgacacgtattgaaaaaaataaacttagtgttcgaggaagagtctattgaaaattggaaggtttcagtaaatactgtgttcccccatgttcacaacagattatctgcgccgaaactttccatcgacgaggctaatgaagccgtagaaaagtttttgatacaagcaggacgactcatgtctctgtaaatgtctcttcctttatgggtgacgtctcttcctttgccgaggaagtctctgttatgggcaagaggtttgaaacaacgcaaggactctgcttaatctgctgtctcacaaagggaatcaaactacctgctttcgtatttttaatgtagtaattacccttgttgtgatgaattttaagaccatagcgtagtcccagtactttattaatgaattttaaaattgtttgagggtccgttttattgggctttttaagcttaaactcaaagctgatcgcgcttaaatcatactgaacaaattcatcaacgagtttcgtcattaattgttcattggtcaatatattagggtcctgaacgcatttaaagccgcacttagttaatagcataatagcgtacatatgagattgaaaactataattaaattgtagatcatgatgctctgcgtgttgcatggcccattgatgaaagtttaattcctgagtttgtaacatagtgagcgactcgtatactgtctttccgcggcttatttggacacggccagtatagttctgttttgtcataaaactattgtattgttcaacaaatttgggagtaattttatgaccgtgccatgcataaaattcgagtagtttatacttttcatacgcaaataggtcttgctggtctactgtgatgccttcctttaagttttgtttaatttgtaaagctttattggcatcaatggtttcagccgaggcaatgtttacatagtcctggtgtttaatttccattttaatgcttgtatattgtttgactgtctccagcttttcacccgtcagtataaacaccttagcgccggtgtcggcgatctggttaataaatcgggttataaagtgattttttgatagatgttgtatccgcattgtttcgagccatagatggtagtatggagttttataatatatcggcctacctgtttccttactatacgtgaaggaaagctggtgattgcttatggtctgaaaaagggtgtcacgtttttgtaacgtaaacatttcaatgtcttcgatggtttctggatagtaattttgtttcccctgtaagcagattttataacacttactttttaattcacgcacgcggcccaacatttggcaacatgtttctacgtcacacgacatattgttaaaaaagccgtataaaacatcaaatctcttatcttcgtatgaaacacccgctgaaatcgtgggcgtatagataaggatatcaacgagcccccaataatacgatacattattaaaatgggattcccgttcatgagcagtgcttttagaactataaaacccaatttttttttccggaaactttttttggataaatgattgcaacagccgggcctccattaatgaatttgtagggataacaatttttttgtcttctagcaaatcctttaaaaggttatttaaccaagtttctcgtgaagaggtaaaataatacgtgtcatgctgggcccttttatattgattccagtgaaagaagatagggacatccccgcgaaaacgctgtagaatattatacgttcgatttcctaggtttgcgtccaagcatataacataatttgccgtttcgagcatccacatgaaaatggcaaaagagggagcaaagtatttgtgcaggccgctattgaattgattaaaaatcgattctacctcatccaaaataagtaggtctacaggctcggctgtggaggttagccggaaaagtgattctacctgaatgatgactctttcgtagctgtccaaatctccagttacttcgctgtacaatgtgaaattcggtagccgggattgtatattttttgagaagatctgtcgaaacgtcacaaaccgtatggtttgttgttttgaaatagaattattgccgtagtatttttgcaaatagttgcgcagttggacggttttacctattttcatttgagcctttacaacaagcgtagggactcgttcatattctcgcatactactttcatcatagatgtgtttttgagtatcaggcagttcttcaaagagaatggactcatgaacctctatgctctttgtcatcacttggtccacatatgtttccacaaaattatttgtgccggaaaggctgcccatgagaaggctatgtttattgtcatggcgacagtgttgatacactttgtttcccgtgactcttaaaattagggtattgtccttatcatgcatacgcttacatatttcgcagtaacttggacttgtacgtttaaacaatactaaatttttatgaacacggaggaagcaatgatttttacatagtgttcctgcaaattttaatacctcttcaagttcactttgttggatagtatcgcaggaactcggtgttgtttcttttacatttgtgaagatacaaggtaaacacgtcgtttcaaagggggttgctataagggtatcactctttttcgtggttgtactggtctcaaacacctctgcaagctcctcattaaacattttaacacgcatgctaccttttttatgagaccctatgatgcgaaaattttgaatacttttgttgacctgggggtcaacaaaaggataaacgtgtttgggaagattttctaacactttggatgtaaagactttggcctcattattgtttaatactgagtatgtataaagtatgatatgaaaggagtatttaagttctcgctttttatttaatccgatagaatctgttagcaaaatttgttcacgcgttagattgatgttataaggtaaagaatatgtctcgtaaaatacatccatgatgacgttaattatcatgtcaaggatgtcatagacattgtcttcgacattatcattgtcatcaacattgtcatcagagtatgacttatttaccggaaagtcgatgtcaaattttaagcgctgaggcaaaaacccaaataccacttcgtggaaacacttctgctcaaagggctgagccgcctcccactcccaaaagtcatcacgacttgaaaaaactctaaaaagattattatattcatctcgcaccacgaagtgattctttaaggtttcgagagaatatttatcctctacggcttctccttgggagttacagcgaagaaacttgaatgtttcttgcattttgatatttaaaattaaatcaattatgatgcggccgctaatgcggcggttgacgcggccgcgccgctgacgcagccatcatacataaagcggcatggccgttttataacgactagtcggccgttatatgacgaactatataaaaatgaattcttttaattagagttaagtattgttgattgtataatccatcatggttgagccacgcgaacagttttttcaagatctgctttcagcagtggatcaacaaatggacactgtaaaaaatgacataaaagacattatgaaagaaaaaacgtcttttatggtatcattcgaaaactttatagaacgttacgataccatggaaaaaaatattcaagaccttcagaataagtacgaagaaatggcggccaaccttatgaccgtcatgacggatacaaaaattcagcttggagccattatcgcccaacttgagattctaatgataaatggcactccacttccggcaaaaaagacaacaattaaggaggctatgcccttaccttcatcaaacacgaataatgaacaaacgagtcctcccgcctcaggcaaaacaagtgaaacacctaaaaaaaatcccacgaatgcgatgttcttcacgcgtagcgaatgggcatcctcgaatacttttcgagaaaagtttttaacaccagaaattcaagccatattggatgagcagtttgcaaacaagaccgggatcgaaagattgcatgccgagggtctttacatgtggagaacccaattctctgacgaacagaagaaaatggtcaaagagatgatgaagaagtaatatttttggtaaaaatatttttatcaaaatttttttaccaaataataaaaaatattttttacttttttttcttcataatatacatagaatgcctacaaaagctggcacaaaaagtaccgcaaataaaaaaacaacgaagggctcctccaaatctggttcttccagaggccacaccggcaaaacccatgcttcttcgtccatgcattccgggatgctctataaagatatggtaaatattgctagatctagaggcattccgatttaccagaatggatcgcgtcttactaaaagtgaattggagaaaaaaattaaacggtcaaaatgaatataatcaggaaacttaagcctggaacaattagccttgtgctgggacccatgtttgccggcaaaactacgtttcttattcattgcatttacatgctcgaacgtttggaaaaaaaagtagtcttcataaaatctaccaaaaacacccgagacaaaactattaaaacacactccggtatacagctacgacccaaacaatgtaaaatcatagaaagcacacagttatctgacgtgggttctctcaccgatatccatgcagttgtcgtagatgaagcgcatttttttgacgatttaatcacatgccgcacttgggcagaggaagaaaaaattattattcttgcgggactcaatgcttccttcgagcagaaaatgtttccgcccatcgttcgtatttttccttactgcagctgggttaagtatattggccgcacctgtatgaaatgtaaccaacataatgcatgctttaatgtgcgtaagaacgcagacaagacgcttatccttgcgggaggaagtgaactgtacgtaacatgttgtaacaactgtctaaaaaatacatttattaagcagttgcaacctattaaatattaaaaatcttatacaataatggatcattatcttaaaaaattacaagatatttatacgaagctcgagggtcatccctttctttttagcccgtcgaaaaccaatgaaaaagagtttattactctgctaaaccaggccttggcctcaacgcagctttaccgcagcatacaacagctgtttttaacgatgtataagctagatcccattgggtttattaactatattaaaacgagtaaacaagagtatttatgcctgttaattaatcctaaactcgttactaagtttttaaaaataacgagctttaaaatttacattaatttcaggctgaaaactttttatataagtcctaataagtataataatttttacaccgctccctctgaagaaaagactaaccatcttctaaaagaagaaaaaacttgggcaaagattgttgaagaaggaggagaagaatcctaagtcgcttacatttttttttgctatttttatagaatgtacacgcatgttgatgttgtcggaatagctgaagcctcagcggccctctacgtgcaaaaagatagggatcgctacttagacgtgctaacaaccattgaaaactttatttaccaacacaaatgcatcataacaggggaaagcgcccacctactctttttaaaaaaaaatatttatctttacgaattttactccaacaatgtggcggagcacagcaaggctttggcgaccctgctttataaacttgatccggaatacctcactcgttacacagtactcattaccaaaattcccaaccattggtatgtgattaacgtagatcagcgagaatttgtgcgcctatatgccatcccggcagttaaacaacacttaccgattcccattttacccttctattgcaccagcgcactcacccagcaagaattgttttgtttaggacctgaactgcagttaatacaaatatattccaagctctgtaaccccaactttgtcgaggaatggcctacgttgctcgactacgaaaaaagcatgcggatgttatttttagaacagtttccgcaaagattggaaatgacgggcgggaagaaggaggagaaggaaaagcatgaaagtatcattaaaaaaataatactagaaatggtctctacccgtcagcgaatcgttgttgggggttacatacaaaaaaacctgtacaaccatgtactcaagaatagaaatcgtttacagcttattacgagcttaaatatttatgaagaaaaagatatcatccagcaattttgtgattcaaatggactgaagatcaaaatacgtatcaacaatccgctcttgcctacaaatccggaattacggcgtttgactatttattttaatcataataatgatgatgatcagtcatatctaatagtagatatgtacaacacgggaagctatgagctagtgcctacaaatcagataaacacgcttgatggcagctttttaataggaacacccttcgtgcaagcgcgatttttgttggtagagatctgggtgcttatgcttattgcgcagcaaactaaaaaggacaccaaaaaaataatacaattttttataaatcaatatgaaatgcttatgaatagtccttggcccagtatggaggccctttttccctcaagcagtaaaagatatttaggcaactatgtagaccctaacgcgctcataaagtgggcacaactcaaattaaaaagaataccgcctttttatcctggaaagccggatgaagaatcatgttaagccgattaaaaaatcatgttaagctggttgaaaaatcatgttaagctggttgaaaaactcttggtgaaagcacggatgtaatattaacattggccgctcgcatttcgtgttgaaatacgatggaagagcgacggctatctaccatgccgatatcggcctggacatcacagttcatgcacttgtagatgggatgactcgcgttatagatggcaggctcgccacagtttctacagatgtaggagatgcagccatccgagtcgtcgtgcgatttttctatgatggtttgcatggcgccctgcgccgtaagcacccaatgctccatttctcccagacgaagacctccgtgcgatcgtttgccgtccaacggctggcctgtgagggcatccgtgggcccatagcttgcaacggcgtatcggtcatccagcacaaatttttgcaggcgctggtgataggtcggtcctatgaagatggccgcatcaaagtactcgccggtctggccgttgaacattttttggcatccattgaagcgtagaccttcttgcgccagtctttctgaaagaagctgcacattaataggcaggaatgcggtgccgtctgttaccaccccctgtagggcatttgctagaccaaccgtggtttctatcatttgaccgttggtcattcgggagggatgtgagtgggggtttacaatgaggtcgggctgcaatccgtcctctgtgaagggcatgtctgaagtgggcagggccagcgccgcaatgcccttgttcccgctgcgagaactcattttgtcgcctatattgagatttctttcatagcgcaggcgcatgaggccaaagatctcgtcattaggcccatggggacgcatcacagcatccacgacggccggctcatcgaagccgtacatgacagaccggtcgatgtatttgttgagttcgtctttttcgccccgtattttggccacttttcctataatgatgtcgccctttttgaccaccgttcctacgggcacgaatccatctacaagcttttcgtaattagcaccaggcttaagatttttggtgattaaagggtcgggcttcccaaacgactctatatcgctttctaattctactttttcttctcggtagaaggtgccggcaaagccgcccctgtcaataaaggactgcgacacgatcacagagtcctcctgattgtagccgccgtagatcatataagccacaatggtattaagcccgttgggtatgacatagttatgtgctatggtctttacaagcggcatttcattgtaaaactggaagaagcggttcatgtcgacacgatatggccagctaaagcaataccagccccccgtttgccggccttggtttgtttcataggtaacacgcgcaggttgggtacagtttgcgtagggggacactagggcggcaaggcccaaaatagcttggggcacgtccacgtgtgtgaaacgacgcgttacatcatgtttatgtttgcgtagctcgatgatggagaaggcaacaagacagttttccgcctcctcgggggtaatgaactcacagatgccctgtgctacgagatcttcaagtgtaagcgttccggctaaaatgtcttttgccatttgaggcgtaaatcgcgtattttgaatgaaagggattttatgtttttcccagtctttatcgcctttttttctggcctctgcggccttgtagcaggcttgattgtatttttcaatattattatctacaatgagtagggggcgggtcagcctaccgacgtccaaccaaaattctacttcgtctaccatgctatcccagtagatggtggtatggggatgcacaaccttgccctcacggcgaagcattctataccgctgagcaagctcaaaggcattggtgcagcagccgatccattctccgttgataaatacgcgcgctaggccctttcgtacaatgtccttgttggaaacatcggctaactgttgaatggccggatctgatagaaggcgttgttttaacgaaagtacttctccggcggtgcagacattggcagtgatggctaactgtttagacatgcctactttttcaccagtatcggctgactgggctacgcagatgtatccaggataggatgcgtgcacgcgacgcatcatgtcagccctttctgtttgtttggatgcgttggtggtgttatgagtatttaccgtacgcaatgctgaaatggtatttaataaattttttctttccaaactttgagtagatactctgtttacaatggggcgctgtcgcaccatgatggttttatttcctgaaatgatagactgttccatactgcgattaagatcggaggcggtattttttgataaagcggcagaaaatgcctcgataatgtttcgctgagtaagctcctcaaaggctgtttgtttaagaagttctttgaacccattgatgatgggtgctatcacggaagtattaaaaatagccttaaaggccttggcgagtgagacccctgagccgtgcacccgcttggtgcggtagctatcacggtccgtgggtggaaacacattcataatgacaagaagtattttatgaataagcaggcctaaaaagcgcagctttcgtacacgtgtatctgcggtttggcccatgtgtggcagcaatattttgtctaaaatagtaagttgtctttcatttaagtattgtaccgcattttcatcgcttttgtaagcagatgggtttgagacaaatttggaaaccttctcggataaaaactggataattttttctcggttcagctcgtgttggaccggttgaaatatggggtctaaaacatgaatggatttttccagaatttctatcatgaaggtattcacaagggagttggattctagatcaaataccacttgctcaatgatgctgtcatcgcctgtcattccaaacatgcgaaagatgagataccaaggtatgcgaagttttgagaacttggtgctattgatttcaatggtaatggcgccggtggtcatgtagcgtataataatttgagagctattttcgaaggcacctcccggttgggagataaactcgccgcgaatgatttcattattcccttgttgcatggtatggtaatggatgtgaagcgtgttaaagcggatgttttctaagaggtctacgacccattccccgcctcgggctataaagtagccgccgggttcattagggtcttctcctatttctttttttgcggtttttgataggtgatgagtgtggcagcggttgctgccccgcatgatgggaaatgtagatacctgaaaaggaggaatacttgctcgttttacctcctgccgaccattgctgtagtgcgccgttaaaataacctcggcggctagattaaccgggcccgaataggaaaggccacacaggcgtgccttattgggtagtaaatttatcttgtttccctgtgaatagtttcgatgttgcgggcgttcaatgttcacatctgtaaagttaaattggatctgaactgattcccgaagcttatctatttcagtatggtcgcgttggtctttataagtaatatccacgttaaacatttgttttacaatttgcggaattccattgtccataagatcgtcgaagcttttgatgttataccctatcaatcctgtagagtttactgcagcggagataaagctcagcatatcagcctctgtaagctcctcattatccacggtttcaatggggccgtaggttatttgcggccgcaagggttccatgattatgaagtactacattaatattcagttattctttaaaataaatctttatttataaatcttatttataatataagaatgccttatgcaagagacatcacaaagtttattacggcaacggaaccagaggtgggtcttcccctgttggcgctgcagcgctccaaatccatcataggggttattcttcttgtaataagtttgttatttattttcattggcattattatattatcagtgagtagtggtcataccacagcagcctctatatttatcgtattgagtcttatcctaggtggcggtggtttttttcttatttataaagataattcttaacccacataaaatttgaaaaaatatagagtaagaaaatgtccaattactattattactatggcggggggagatatgattggttaaaaacagtagaacccactaattttttaaaaatcgggttgccttaccaggcacacccattacatcttcaacatcaggcaactactcccccatctatcttagaaaaatttaaacgagcagacattcttcttaatgaggtgaaggccgaaatggacccactcatgttacaaccagaaaccgaaaaaaaactattccagatattgagtagtattgatatgttcaaaggtctgcgaaaaaaagtagaattcacgtacaatgctcaaattgttacgaatgcttggcttaaaatgtatgagctgctaaataccatgaattttaataatacatctcaggcattttgcaattgtgagcttccaggagggtttataagtgcaattaaccattttaattatacaatgatgcattaccctacttttaactgggtagcttcctccctttaccccagttcggaaacagatgccctggaagatcactatggtctttatcagtgcaatccggataactggttgatgcaatctcctttactgaaaaaaaatatagattataataacggggacgtaaccatcgctagcaatgtaaaaaacctagcgcttagagccacacaaaggctgacgcccatccatctatatacggctgatgggggtattaatgtaggacatgactacaataaacaggaagaattaaatcttaagcttcactttggtcaagcccttacgggtttgttgagtcttagcaaaggcggaaacatgatactcaaacactataccttaaatcatgcatttactctttctttaatatgtgtattttctcacttttttgaggaactatacattaccaaacctacctcctctcggcccacaaactctgaaacctatattgtgggtaaaaacagattacgcttatttacccccaaggaagaacaagtccttctaaaacggctagaattttttaatgatacgcccctcgtagacctaagtctttaccaaaatttacttgaaagcgtttactttgccgtagaaacaatacatctaaaacaacaaatagaatttctaaacttcggaatgaaatgttatcgacatttttataacaagattaaactacttaacgattatttagctccgaaaaaaaagatttttcaggataggtggcgtgtgcttaataagctttatgttcttgaaaaaaagcataaacttaagctttgtgcctcctagggatctgttgcttaatttaacagatgcaatcttaacagatgtaaactaaaaagtgtgttcatacaaggattgtatttatgaatatttattaacatataaggttgtgatgtaacactgtataacctatataactacactatgaagcacggcgtataataatttatattgaacacgatgttgactcatttatttgcaaacaaatatttgtttgcaagacgtttgcatgcatttactaatatgttgttgactagtttatttgcaaactagatgtttgattgcaaactagatgtttgcacgtatttatttgaactaatatacactccttgttttatttgttatatacacagcatacataagtgtatattgtttacacttatgtttataactcgacgtaataacattttacacgctttttttttgcaaatcttaataatattgtatgataaatcaaacaatgtcttatatatgtggtttattattttaggcgccgcaagatgtactccattctcattgcatgcttggtgttattactctgtctagttatatatgtcggtcatcgtgccgatcatgcacgaaaatatttagaaggaatgtggcatggagatccggtttttctaaaacagtcggggctacaatccttttatctctacatacaacctgaccatacatgtttttttagcattgtgaataaaaatggtgaaaagctgatggaaaccaaaataccttgtacgataacaaataaaatatatatgttttttaaacctatttttgaatttcatgttgtgatggaagacatacatagctacttccctaagcagtttaactttctgttagatagtacagaaggtaaacttattttagaaaacaatcacgttatttatgctgtattgtataaggataatttcgccaccgcactaggaaaaacggttgaaaaatatataacacaaaattaatcatgttttctaacaaaaagtacatcggtcttatcaataagaaggagggtttgaaaaaaaaaatagatgattatagtatattaataattggaatattaattggaactaacatcttaagccttattataaatataataggagagattaataaaccaatatgttaccaaaatgatgataagatattttattgccctaaagattgggttggatataataatgtttgttattattttggcaatgaagaaaaaaattataataatgcaagtaattattgtaagcaattaaatagtacgcttactaataataatactattttagtaaatcttactaaaacattaaatcttactaaaacatataatcacgaatctaattattgggttaattattctttaattaaaaatgagtcagtactattacgtgatagtggatattacaaaaaacaaaaacatgtaagtttattatatatttgtagtaaataatatttttaattacttaaaatttttatatataagtttttgatactatattataaaacatatgttcataaaatgataatacttatttttttaatattttctaacatagttttaagtattgattattgggttagttttaataaaacaataattttagatagtaatattactaatgataataatgatataaatggagtatcatggaatttttttaataattcttttaatacactagctacatgtggaaaagcaggtaacttttgtgaatgttctaattatagtacatcaatatataatataacaaataattgtagcttaactatttttcctcataatgatgtatttgatacaacatatcaagtagtatggaatcaaataattaattatacaataaaattattaacacctgctactcccccaaatatcacatataattgtactaattttttaataacatgtaaaaaaaataatggaacaaacactaatatatatttaaatataaatgatacttttgttaaatatactaatgaaagtatacttgaatataactggaataatagtaacattaacaattttacagctacatgtataattaataatacaattagtacatctaatgaaacaacacttataaattgtacttatttaacattgtcatctaactatttttatactttttttaaattatattatattccattaagcatcataattgggataacaataagtattcttcttatatccatcataacttttttatctttacgaaaaagaaaaaaacatgttgaagaaatagaaagtccaccacctgaatctaatgaagaagaacaatgtcagcatgatgacaccacttccatacatgaaccatctcccagagaaccattacttcctaagccttacagtcgttatcagtataatacacctatttactacatgcgtccctcaacacaaccactcaacccatttcccttacctaaaccgtgtcctccacccaaaccatgtccgccacccaaaccatgtcctccacctaaaccatgtccttcagctgaatcctattctccacccaaaccactacctagtatcccgctactacccaatatcccgccattatctacccaaaatatttcgcttattcacgtagatagaattatttaatatgtactatatattaattatttaacctttcaagctggtcttcatttaaatttaaaatccactaataaaatgtattttctagtagcagatcatcgagaacatcatgtgattccttttcttaaaaccgatttccatcacatgcatcaaaatcctatacaaaaaaatcaagctctcctagaaatcaaacagctttttactggagattatctcatctgcaaaagcccttctaccattctggcctgtattgaacgaaaaacctacaaagactttgcggcttctttgaaagatggacgttataaaaatcgccaaaaaatgctgtcgctgcgagaacaaaccaactgtcaactttatttttttgtagaaggcccggcatttcctaaccctcaaaaaaaaattaatcacgttgcctatgcaagcattattactgctatgacgcatcttatggttagagatcatatttttgtcattcaaacgaaaaatgaggcccacagttcccaaaagcttgtgcagcttttttatgccttttctaaggaaatggtgtgcgtcgttcccacctccctcacccccacggatgaagagctatgcatcaagctatggtcttctctttctggtatttcaggcgtgataggtaaaatcttggcaaacacttgttccgtagctcatttggttcatggaaagctttcatcgcagaatattgatcagttaaaaactccctccaaccgaccattccccaaaaaagtaaaacgtatgcttataagcattagcaaaggaaataaggagttagaaataaaattgctctcgggggttcccaatatcgggaaaaaattagctgccgaaattttaaaagatcatgcgcttcttttttttctaaatcagcccgtagaatgcttggcaaatatacaaatcgttcaaaaaacccgtacgattaagttgggaatgaagcgagccgaagcgattcattattttttaaactggtgtggctctgcccatgtaaccgatgatagccaaaatatcacagaggcgtcgcggtccacaatgcaggtcgcgacgcagtccgccgcaatacagcccgctgcaacgcagccattgcacgaagtatcagatgatgcatcatcagatgcttcatcacccgtagggtatcaaacattatctaaagaaatgttattgaacacagcctgatgttaataattcactacatctaaagaaatgttaacctcgatactaaaaagtcattgaacacaactactggggcgctaagttgtccaacacatctaaagaaatgtcaacatcctcgatgctaaaagggtcatcgagccggtcaataatgtcttccccaaaaagtccgggagaactgtaggccgagatgtcgtccatggagctatcttccccagagcacacaaagtcctctccaaaaatcataaagttaaatgcaccgggcttacttaacagcttttcgctttgaataatagtgttgagttctgtcagcgcaaactctctcacaatattcacaacccaggagggctctttaatttcatacagcgttaagaaacttatacataaaaattctatagagtaaagcaaggcgctggcaggatctgttacccgtaggtgtttaaatgtagtgtgatattcattcacaacgttaggcagcaccttttccaaatcctccttttcctcgtacgacaggtgctttacaagcctttcaacatgtataggaggcttgttaaatgtactaacgtgccgcaaacagttataattatataagaaaatacgtacggcagagtcgaccgccatgagccttggatcatccattgaggtaggtggtggcggggcaccctggccttccctgatgtctgcgtaggagcgcccctccatggcccctatggcctctatcacagcaggactgatatccaaaatcttggccgtcttgattatttttccgtaatcgaaagtccatggctcctgtggaggcttgggttgtgtttcggtggagggcgtggtcatatctttctttatttgaatagaacggatcgacatcttttccttatcgtactggtctttataattattataatagtcatgaactaattcgggttgagaaagatgatcgtatataatataggtaaaaagtccgcacttgacacattttttatcctggaagtcgtgtaatcctcccttggggcagcgtgactcgtagaaggcataaaaggtgttaaattctaagctcgcctttagggctgtttggaccttttttatgtttaattgccccacctcatgttgtagcacgtggcatacagaacagcgtagatcggcaagtgcataatggttgtcaattttttttatgacgtctttgcgtgttacttcaatctcggcgggtttctgcgaactgtctacggccttgtaaacgtaaatggtccacttatgaggaagccccctttcatcgtatagggttgaaatgggaagccttttatactcaaacagccgagtccgttggtcggctcttcctgtgttaggatcaaatatgttataaaatccttgctgagcaagcagggccttttgctcgccataagcattttcgtacgttttgaattctgcaagttcggagttaaaattaggtgcattttgtaaatacttaagaaataattcataggctctaaggtaaatgagagttgaggttttttcctcatcccgtcctccccaccacacccgcaggctttcttcttgaaaatagatgtcattcagacgcgtcaactgcgtaaaatcaggccgatatttagaggtataaattttatcataaaattctttttgcgataatagctcggccggggtacgtcctatcacggttttaaactcatattcagcctccttgggagtccgtggtttgtgcatagggatgctgccgtcaatacgggccactgtggcagcataatcatacatggggtccagcagaatctctgtcaaaagtaccttggtgtcgtcctgcacgctaagcccttgtagcccattttggtggataatttttttgaaagcctcccgaaaattattagcaatccactgatccgtaatctcagatagctgatttattataccgctatattgctgcatcattttctccaaaagaaaggtcacgtatgcattcaaagagctatccgccttcattccatgaatggtaatcgtaagaaattctttatttttttgcgagctataaatgagattcaaaatataggcatagatgtagatcacagcatacagctgcgttaaaggatcgtaatcctcttcctttttaatattttcgatgctatacacgagcggcaggcagacatttacggctatattggcaaactgtttcacgtctacaagctttccaaagtggataaacgtgcaggccttcatggtttcctgccaaataaaaacacggagcttactattaagatcgccgatgatgcccacatctgccgtacgatcctcttgaataaaatgggccagctcttcgccacaaattttgcaaaagtaggagtaaataagcccctggttgttttctttctccttgtttattcctgaaaatttcattagcttggttcgcatggtgtcgtaggacgcttctgccgcttgaagctgtataagcatgtccacatggggacaaagcagcttaaacccgcaggctttgcatagattccaattggtggtattgtttttttccttgtagagtacacgaatactttctaatacttttaataactccgcgtattgaagacccgaacgcaactgttttaccagcttgagatgagcacatgcatttttttcttggagttcccactgttttttaatgtttaggtattctgttgtaataagttctgcctcctgtttcccacaggctttaatgacttcttgaaggatgctgttagggtcatccactttaccctccattgtaagaatttcacgtatagcatccgactgcaccctacctattttttcttccataattttaaaatactgtctcgcctgggtaatgacctctgtgagcttcatgtccacctgctgcagaatcatttgctccttttcacgctgttcagcatgttgtaaaaacttttgttctacagggttccaaagcacctccaaatagcctgctctatataggtcataaagcaagggcatgtatcccgatgtaaaaaccggggacaccgagtacatcgtagacaactcttttaaaaaaaatatcacgcgcttaatgttctcctccggttcaatctcctcggtttcaacgatattagatatatgactgccctgatcctcacggtctagctttcggtgtaccatctcctctgctagccgattaatgagccagctatgcccgccgctccgcaaaaacttataaagttcgatatactggtgcgtaaactggatgatgttttccttggtggttacgacaaccccttctccgttttttttccaggtttcttgatccacgcatttcataaatactcgaataaaattggtcaaattggctcctgaggcgacgtagcccaaggtttcaggcgagaaggagcctatctcagccatacgcataaaacactgcggggaaaaagtttttagccgcaacttaagtccatagatttcaatgggggcttctgcgggaacggccaggtgcgtcccattaattaaaaaaatttctttgcgtgtgctagggcgaacacgtaattccttttttttttcactcacgatggggaccacatcggggtctaccagcagttgacgtatgtaggcctctatgggcatggatagatcgggcagctttgactgctcggcgcgaacatggttcacaaaatcttttagagtgaaaagaaagtctattaaacgtatgttttttatatcattagaccctttaagggtagagtagatttcatccactagtgcctcgatttcctcattattgagcgataagatatctgtgccacggtggactatttgcgcgatcgtaattacttcctccattagatagaaactgaatattatatttaaaataaatacaaaatgtcaaatgaaagttttcccgaaacgttggaaaacttactttcaatgttacagaccaaacagcaaaacgcaattcagtcagaggtgattgaatggctgcacagcttttgtgaaacctttcacttaaaaatacactgccataaacagtttattcctagcggggaaaaaaaacgagctaaaatacccgctcaagaaacacagggaaacacgcagccctcccaccatgtgtaccgggttgttctctccagagcacagccagtcaaagcacaggaatctctgctaacaaccatgtgcaacggactggtgctagatgcaaacacatggacatgcctagccattcctccgcctgcgccctttcaacaggcgacccgccaggtccaacacttttaccgtaacaatttctacgaagtggttcccatccaggatggcacccttctcacaatctaccactgggatgaccctgaatatggcccctcctggtgcctagcaagtacccacggatatgatgtgagtaactactgttggataggcgacaaaaccttcgccgagcttgtatacgaattgctgcagcagcactctacctgcgacgtcaccctggaaaaaaataaaacgcggggaacgcgtcttttctttgataacttaaatcccgattactgctatacgattggaatccggcaccataatttacagccgctcatctatgaccctcaaaatatttgggcgattcaatctacaaacctaaaaacgcttaaaacggtatatccagaatactacggctatataggcattccaggaattcagagtcaagttcctgagcttccccagtatgatttaccttatctaatacgatcttataaaactgctatgaatcaagccaaaaatgctataaaaaatggcaaaaaagacaagggatactttaattatggctatttactcatttcgcgagcgcctgccattactaaaagtacttctaatgttttgttaaaatcgcctctgctggtatttttacaaaaaagtgtgtaccagaaaaaacacaatatctctaacagccagcgactagaatttattatactgcaaaactacttgatgcagcattttcgagatcatttcattgctctatttccgcagtacatatcctattatacgaaataccaaaacatgttgaatatgattatccatagtattgcaactaaagataaagatcatccctttgcaggagccgtggtaaaaaaagtgttggaagatattgaaaacgccgaaaacattattgatcatacaaccattcaaaactatgcccatcaaagcaagtacgccatgctttacttgtcaattatttcccatttttaatctaatacggccaaagccgcgggttttttaataaactaacatttaaaaaaactgttttattaaaaattataatacttttattatatatggaacatccatctacaaactatactcccgaacagcaacacgaaaaattaaaacattatgttttaatccctaaacacctttggtcttatattaaatacggaacgcatgtccggtactacaccacacaaaatgttttccgagtcggtggctttgtgcttcaaaatccctacgaagccgttataaaaaatgaggtaaaaacagcaataagactgcaaaatagttttaacacaaaagcgaaagggcatgtaacgtgggccgtcccatatgataatattagcaagctatatgccaaaccagatgcaattatgcttaccatacaagaaaatgttgaaaaagctcttcatgctttaaaccaaaacgtactgacgctcgcatcaaaaatacgttaaatataatttttgtagaggataaaaagctattttagctaaaaaataattcatatacgtttatgcagaggaagaacggtggctttcaaattcagattgcatccacgtagaccgtagcgttttttttgcttctggtttatatcgtaaaccgtaataaacatcatcatttgtatccgttggatctttttcccactccggataaaaaatcggttttctttttttttggtcgttttttgcagtaagctgtaaattaagggaatatagcttatcgaaaagttgttcctgatccatataaatagcagcatatattaaaaaaaaataaaaaaagacgcttcaacgagtcagtaccactgcttgccaacgatttacgttggttggtgcattatggtgatatagtaatgagtgcctgcacaagtgcttgcacaagtgcctgcacaagtgcttgcacaagtgcttgcacaagtgcttacacaagtgcttgcacaagtgcctgtacacattactgcatcgccaaagcacctgcaatgcctacttcctcaacagagtacgataactaaatgcttttaagcaccgcttgcgtcgatgtgtccttcggggcaatcgggttcaattggatccaatattattagtcataattacctaatacttattcaattttatcttttttaccttgtaagatttaaacagcgttttagcttgtttaaagcaacgtttaaaacaagctaaaatgctgtttaaaacaacgttttaaacaagttaaaacaaataagcttataaatataccatgacaaaattagcccaatggatgtttgagcagtatgtcaaagatttaaacctaaaaaatcgagggtccccctcgttccgcaaatggctcacattgcaaccctcactgctgcgctattcgggtgtgatgcgtgctaacgcctttgacatcctaaaatatggctatcctatgcagcagtcaggttatacggttgctacgcttgaaatccactttaaaaatattaggtcttcctttgccaacatttactggaaccgtgatagcgaggagcctgagtacgtctgctgttgtgccacctatcaatcgcacgatggcgaataccggtatcgatttgtttggtaccaacccttcatagaggcttataatgccatagaggcggccctggatcccctggaaaccattatcctgaacctcattgcggcacgagatctagacttcgttgttcacatatttccttataataagggccatgaagactatttggcctccacgcaacttattctcaaaatctttattgcgacgcttttaatggacattttaagaattaaagacaacacgttggacgttcacttaaattccgactatattattgtgatggagcggctttggcctcacataaaggatgccatagaacacttttttgaagcccataaggacttactagggtacttaattgcctttcgcaatggggggaactttgcaggaagtcttagaccctcctgtgggcaaaagattgttcccctaacgattcgagaggtcctacaaatgaatgatattaatttagccgtatggcgggaggtgtttattatgcaggaatgttccgacttagtcatcaatgggatagcgccctgtttccccatttttaacacgtggacgtatttgcaaggtattaaccagattttttttgaaaacacgtctttgcaggagaaatttaaaaaagattttattgcccgagagctttccaaagaaattatcaagggccaaaaaacgttgaatgacaaggagtttaaaaagttaagcctacatcaaatccagtacatggaatcctttctacttatgtcggatgttgccattatgattaccacagagtatgttggctatacccttcaatccctgccgggtattatttcgcgatccagctatttatcccccatcgtgaaaaacattttgatggacgaagactcttttatgtccctactatttgacctatgctatggcgcctacgtgttgcataaaaaagaaaatgtgattcacgcggatttgcacctgaataacatgacctactaccatttcaacccaaccagttttacagatcgcaacaaaccaggaaaatacaccttaaaggtcaagaatcctgtgattgcctttataaccgggcccaaagtcgaaaccgaaacgtacgtgttcaagcacatagatgggttcggctgcatcattgactttagcagagccattatggggccaaaccatgcaatcaagcttgagcggcagtacggcctcgcttttgtaaacaccttttaccgcaatcaaagtgagcatattttaaaggtattacggtactattttcctgaaatgctaaccaatcgcgaaaacgaaatacagggggtgattttatcaaactttaatttctttttcaatagcattactgccattgatttttacgccattgctagaaacctacgtagtatgctttctttggactatttacacacctctgaggtgaaacgaaacgtagaaatttcgcaaacatttttggatacatgtcaatttttggaggaaaaggccgtggaatttttgtttaaaaatcttcatactgtcttatctggcaagccggtcgaaaaaacggccggggatgtgcttttacccatcgtatttaaaaaatttttatacccaaatattcctaaaaatatattacggtcttttaccgtaatagatgtatacaattataataatataaagcgttattctgggaaagctatacaaacgtttccaccctgggctcaaaccaaagaaatcttgacgcacgccgagggtcgtacatttgaagatatttttcctagaggagaattagtttttaaaaaggcttacgcagaaaacaaccatttggacaaaattttacagcgtattcgtgagcagcttgctaatgaaaatttgtaaggcttgcagttcttgtatggtcagaacctatgtcgatggaaacattatttttcgctgcagctgcggcgaaagcgttcaaggggatagtcagaacttgctcgtctctagcaaggtgtaccacaccggggaaatggaagataagtacaagatttttattaaaaatgcaccctttgaccccacgaattgccaaataaaaaaggattgcccaaattgtcatttagactatttgacacaaatctgtattggaagccaaaaaatcattatattggtgtgccgctgtggctatatgagcaacagaggataaaccatatcatcccaccgaattatgacattcctttaaaaccgtccgcctaaatagttttcacacctttggtggcagactattttataaaaagtaatgttggttcatgaagataaagtgtgccaaagaaacttttataaacaaatgattaatgtaggtgctagtcgtgtgtacttaaacagggtattctatagccaagtattttctatagccaagtattttctatagccagtattagtcaagtatttagatgtcagggtatttttatagccagtatttttctatatgtacaaactattccagtaaacatatgtgtgttctttattgagcagcatcatggcattaacaagtttattaaactgctctaatgggcattaaatgacaactcggtgcttagcaaaagtgcctataccttttaacaattagggccgggaggcattcccagcttttttctataatcagccatacagtacccctgagcctcatacacgggaataaggtccttccattccttgttgggatcggcgggccagctctcaaatgaggtgtgaatgtaagggtcctgttctttttccttaatgaagcgtttaatctccatttgatgttgtttacttttttgtttgcggcggagcgtgttccgcaccaatacgtaaaaaataccaagaatcacacataaaagaattattaaaaaaaatatcatcatcgcggggtttaaaaaacgatcccatgcaacaggaatcgttcttaaaaccttgtctggcagggctgtaaacatgaagtctcctcctataatcggggtgggactgtagcctaacagttcaaggtcctgtcgttctagatacttattggcgaactgcccaccctttgcccccgtttttttattaatcaagcagcgctgcattttccaccattctaaatcttcaggagaaagctcaatgccatatatcaactttaacgttattgcatctttttcaatatccttatcaatttggctgagcttttgagctttaagcgggtctagtgtgtacttccatttaaacttagtgtcctgtagtttggctacatgaaatacggaacatttcggcggggcctttgtgacgcccttacactgcggaagtttatcattaggacaggcgcatagatgagactgcgccacagcatcgcgaactacatcgcagacggagtacattttcctcctatgttaaacaataaatttttttcatagctgaaatttgtgggcctatcttttcccttgcccggataataattataagggagtgttgaaacatctgggagagaattgcttaaaaaatgggtttttgggaggggtaactgcgactgttgtacgtcgttggccagggagattctatatgccgggctaaaggtgcaacgttcctgtgaacaacttagtacgcgcgttgttaatacaaatggactggtattagcaaacctcgtaaactcttccggacttgtttgtttttgtatgatgtttagcagggagtctgccttttcgagaatccaaagcgtcgcattgtagtaaaataaaaatagcgacttatcggcaggcgttgcaaaagcgccgtatagaaaataaagcagtaagtactggggagacaccacaataaggttatcttgaatgatagatatcgctagctctttaaacatagtgctaaaaaaatgtatgtcgttcgtcttgaatatagggggactatagtccatgtagggctcacatatctcagtcaggtgaaggcccatttcttttatgacttcttccgggttgtacgtcgctaacaccagcgcgggataggctttgggcatatccacggtaagtgttatgtttttatcattcttatggtaggagtaagatggttgtggaaattctgttttccactccgggactttgcaggtaattctcagctcatttagagtctggtacaggagggcgtatgccgcaaagccgtgtatggccacttgtttaaagggaattgaaaacgttttactttcgtatgtcgacttcacaggaacaacgggaatggggtaatatttttctatgaggttataccgctgcaaatcctttttaaacctgctaaaaacatcttcccttggtgggttatcaaaaggaaagcaaaatgctaggtgtagcccggcccgctggtaatcggggtgaatgattttaaggtttttatacgttaatgtgggtatggtgttaaagatattggggggcatatatgaaagatcagcaacccacacaaagtccgtgcgcacccgcatggtctgcacatggatggcgcgcaccgtgcccacctgcttgaagcccttttcatacaaaatgtcagcaagttcgtaggcgtcctcaacgtggttgggggaaaacatatcaaagtcgggtctttctccctcgggataaattgagctgcctttaagatgcagggcataatcaatggcaatccccccgtacaaaataagctttttctttatgataaattcgcggaccacctccaaagccgcctcaatctccacggcatttgcctcacgtttttgagcaatgagccggtacttagaaacattaaaatcagtctttagtaaagacgtcataaatagtgtttaatatatattaaaggtttgaataaaatactaaatagtaaaaatggatgccctattaaaggaaatagaaaagttatcgcagccatccttgcagaaagaaaacaatgatgtatgcgatctctgttttatgcaaatgaaaaaaatttctaactatcagcttttatgcgaagagtgcggtcagctgaaggactggtttgaacctgaatataatgaaaaattcacggtatattctcgtctaaagatcgtgggtgccaatagttcctatcaccagcgcgatttggacaaggccaactcaagtgactatagctccttgcaatttcatcacattttagaggagctcaaatccctaaatgttaagtatatggatgcggggcaaaagccctttcctattcaggtgttaaaagaaactgctcacagttataaccaagtacaacaacatcgggtcatacgcagcattacaaagcttcagatcttagccagtattctacgtagcatttgtttaaaattaaacattgcttgtacggtggcagacgccgcgaggtttactcaacttaataccaaagggatctcaaggggcatggatcttctgcgctccctatttgtagacaataaaattactttaaacgttgatttaaaccctatagacagctttattaatagtacctacagtgccttacaaattaaacaaatccaccaagaactgcaggaggaaaatgtttataatttaaaagaaattgttaagagctttatattatacgcggatgagaagaacatcggcgtcgatcttaacaggagaaccgttgtgattgctacgatgtataatgttttacgccgtgcctactaccccatagaaattgatacggtggtgtatcaatgtaaaatacgaaaaaatacaattacacgtgctcttaaaatgtatgaggattactactcccactttaagtctctttatgagcagtatcatttaaacgcggcaaaaaaattaatttaaactaaacgtttaaactaaatgtttaaactaaacgttaaaactaaacatttcgactaaagtttaaaacctagtctaacagcgggatgcccatttccctggggttccatatttcaacaattttttgaccttcgggtgttaccttgatgcagcgcatgacgagcagtggaattttcctattaaagagttcttgcttagctatatcaataggactgctatatttttttttaagcattgtagatccattaattgccaattgttgcgctctaacggcgaccaaccttgtggcctcaaaggtggttaaaacgttggaggtaatgcgctcgttatcgggtataatgaccaatgtttgcgacgaggcctgcacaaagccctcgcagatggacggagactccacgatctcgtccttgtcctcggactcctcctcactgtcgacgaggttctcctcttccgtttccacatattcctccacgaggtcatccatgataagatcctcgttgtcattatcagccatattacactgttatcaaatgtactgtttaatacgcaaatggatttactacgttttaattgtatgtcttcatgtgcaggctctagtggaaagtaattttctcacaatttttggcaccgttacacttgtgcccacaaaaacccgcgatttttttattttatattacttttggaagtacgagtttaaccagtcgctttcaaaccttatgcgtctatctcgccaaaaaacgctcacagcggtgttggatattacctttaaaaaaataacattaatttttaccacagagggcgtattgcgtatggattctacgaataagccaggcgtgccactcgatatagacccccagttcattgaccttgatagtattttaatggaactggatcattaggacctctcccgcccatttaaatttttagtttctacaataataaaatgcgcgaggaatcatgggaagaccacgataccattcagctcaccgctcagcgcaaatacctcgccgaggtgcaagctctagagacccttttgactcgagagctttcagtctttctcacagagccaggcagcaaaaaaacaaatattattaatagaatcacaggaaaaacctacgcacttcccagcacagagctactaagactctacgagcatctcgagcaatgtcgcaagcaaggcgccctcatgtattttttggaaagacaggggacctactcgggtctcatgttggactatgaccttaaactcaatacaaatgctgttcccccgctggaaccccccgcgctatcacggctttgccatcgaatatttgtgcatataaaaaacagcagtgtgctgcctgagggcagccataaaatccacttcttttttacattaaaacctgaagtggttcagggcaaatatgggttccatgtgctcattcctggtctcaagctggcggcttctaccaaaaaaagcattataggatccctacagcacgatgccaccgtacaaaaaattctacacgagcagggcgttacaaatcctgagtcctgtctggacccccactccgcctccgttccctcgctcctctacggctcctccaaactaaaccacaagccctaccaactgaaaaccggctttgagttagtctttgatagctctgatcccgactacattcccattcatcaaataaaaaatttagaatcttataatttagtttctgagttgagccttacgaatgaacagggaagccttgtaagacctgtctattgcgcggcagacattgccgctgagaaggaggaagagatcccgaccgaggatcactcgctctccatattaatgctacatgatcccgaagcccggtatttacataaaattttaaatctgcttcctccggagtattatgtagagtaccccctatggagcaacgtcgtattcgctttggccaatacatccgctaactatcggcccctcgccgaatggttttcgcaaaaatgccctgaaaaatggaatacgggaggaaaagagaaactagaaaaactttggaatgatgcctcgcaccacactgaaaagaaaatcaccaagcggtccattatgtactgggcccacaaacatgccccccagcaatacaaagaaattgtagaacaaggctacttttccattctcgctgaatatgtgtatagctataacggcatgcttgagcactacatgatcgccaaagtcatctatgctatgatgggcaacaagtttgtagtggacgtggattcaaacgggaagtacgtttggttcgaatttgtgctaccgggccagccaatgaatcagggagaaatatggaagtggcgcaaggaggtaaacccggatgagctgcacatctatatttccgaaaacttttcaagggtgatggaccgaatcacggagcacatcaaataccacctcagtcaaccccatgaaagcaatattttaaattattataaaaaactattaaaagcctttgaacgctctaaaagtaaaatctttaatgacagctttaaaaagggagttatcaggcaagctgagtttttatttcgccaaagaagctttattcaaactctggataccaatccccacctactgggggttggcaacggggttctctccattgagaccatcccggctaagctcattaatcattttcacgagcatcccattcatcagtacacacacatatgttatgtgccctttaatcccgaaaacccctggacaaaactattattgaatgcactccaagacatcatcccagaacttgatgctaggctgtggatcatgttctacctaagcacggccatatttcgcggcctgaaggaggctctgatgcttttgtggcttggaggcggctgcaatggaaaaacttttctaatgcgacttgtggccatggtattgggcgatcactatgcctccaagctcaacatcagccttcttacaagctgcagagaaaccgcggaaaaacccaacagtgcctttatgcggcttaaggggcggggatatgggtactttgaggaaaccaacaaaagcgaggttctaaatacgtcgcggctgaaggaaatggtaaatccgggcgatgtcaccgctcgagagcttaatcaaaaacaggaaagctttcagatgacggccaccatggtcgccgcgtccaactataacttcatcattgacacgacggaccacggcacatggagaagactgcggcattatcggtcaaaggtgaaattctgccataaccccgaccccagtaacccctacgagaaaaaggaagatcctcgctttattcacgagtacatcatggatccagactgccaaaacgcattcttcagcatactcgtctatttttgggagaagctacagaaggaatacaacgggcagattaaaaaagtgttttgtcccaccattgagagcgaaacggaggcgtacagaaagtcacaagatacgctacataggtttatcacagaaagagtcgtggagtcgccctccgcagaaactgtgtacaacctatccgaggtcgtgacggcctacgcggaatggtacaacaccaacattaacgtaaagcgccatattgccctcgagctatcccaggagttagaaaactctgtgctagaaaaataccttcagtggtctcccaacaaaacgcgaattctaaagggttgccgtattttgcataaatttgaaacgctgcagcccggcgaatcctacattggggtgtccacggccggcacactcctaaacacacccatatgcgagccaaaaaataaatggtgggaatggtcccctaatccctctgcccctcctgagaaagaagcgtctgcaccaactccttagggaatatccttagaagcatgtctttcggcagagccattaccggtagcaaaaaagcaacattgagtatattatatgccttagcctgctcataagcgtccttttttttcatggtattttatgtttttaaatatttttaattattttttaaatacgatgaacagttcgtgctccgaaggctgtttactaaaaatcggtgtgaatccgcattctttaaatatggtttcccattcggggatggtatggaaatccatgtctctacgaatagtatggtgcccaagtgcgtcctgcaggctgtgaagccagaaggcctcctgaccttgatgaaggtcgtacatgataagaaaaccatcaggtttcaacagatggtaaagcttgttaaaatcgtttatcgtaagatgatgcgccgccataggtaaccctatgagctccacagagttttcatgctggacatcgtccatatcggtataaaacgtttcacagtaaatgagacgcttaaacgagtatcgatgacaaacatttatttccaagtaggtttgcactacgtttttaggtatatcgggaatcatgttgattaaggttgtttcgggaaacttaatcatctgactaggcttcattttcaactctttaaaggatttcccggagaagtgaaaatgggtctttacgtatttatgtaaaaatacctgaatgggcagagggggctcctcctcttcgttctcgacgcctcccaaaatatttggaatttcctgacgtggcaaaagaaagtttatgtccacgtttacgaatccatcgaggacggacacaaagcttggctctaatctccattccatatactgtttagaaacgggagatagcataatcctaggcgtcacaatgcacgaagggtttttaatcaccgcatcgtggtaagaaaagtgtattccatttcttccagtataaagaagcctatgttcgtcgtagcagaaacaattaaggcggtatgcctcatacatacactgtttcaaagtacaaacacgttttaaaaaggtttctgcattggcggaggccaagcggttttgccattggtggaaggggttcaatcctacaatggccagctcgtttaaaatatcttcgcggcgcgctaaaatctgcaccatagaagaatactttagcatttttttttcgcaccattcgcgaagatgtttagctacattattaaccttattattgataaagtatacgatggcatgttggaagccttcaaaaataaagagcccctccaaaagatcatctgccaatagaagatggatgttggtgtaagcattgtcaatattttgtagaaacggcggaatgcctgccaaaaccgcttcagcaagcatagctccgttccgttgtttactgtccaatagattcgtaagttttttgtccgcaacagacacgacggctaggatggttgcaatgtcagaaatggcggcttgccagaaataacccgaaaagcacatgcgcgcttcttctatagataaaaacgaaaagcgagaggcaatgtctccgagctgcgtgagttgaagacctttttctcctctggttaaaaggcctgccacaatggcccgctcaatggctgatgccagcgcatccgtggggggaggatccagcatatcaatctcctctgccttaaacacgccttccttattttttttaatcgtttctacgacaatgctaagaaaaatggccccagggccttccgtaatgatttcaggatactgctgcactggtatttgctcaaagacgtgttttgtgtaaagcgggtaaaagtgcccaggaaatactctccctacacgcccctttctttgctcgatacggctttgagccgcggggcgcgtaataagccctcccgcccattcgggatagtaggtttcaatgcttctgttccacccgggatctatgacgtacttcagcgtttcaatggtaaggcccgtttccgcaacaaccgtggaaacaatgacccttcttaaaggtttttccactttagcggttaagggatttttcacccacagattcttaatttccgctttcaggccaaggtaggcctcattttcctgcgcaatcgcctcactatcgatcggcaaaatcaacattaacggcagcttttctttggcaaggtccatatttgcattattcagcaacatcgaaaggaagcgtatttcagccataccgggcatgaaaattaaaatatctgcttccgtgggacgatcatgaatgttttctttatgaatagtgagagccgtttcgcaggcggtcttaatgtagttgttggtgttatacagcggccagtgggtttccacaccgtactgtcgtccttccaccaaaataatgttttcttttccgataccaaaataggttgagtatttatgggtatcaatggtggcggaggttaaaattacaaagggaatacgcagcgcccctatgcttcctctttgcaacatgcgctgaagcatacttttaatatacatgagcataaggtcgatgcctagggctcgctcatgggcctcatctataatcataaaggcatagcgggaagctatctcatcatccgtcattgtatgtagctgcgccaacagaacccccgcggttgcataaataaggccccgattgggtttttccgtcagaggcttcgtttggtagcccactgtttggcctaatatcatgtcggggtagtgggttgaggcgccgatgtctttggcgagggtcaccgcggttaggactcttggctgggtacaaataaccgagcgtcccaagtatttttggaaagaatgcgtgttttcatttctcagaattctgaacacgtgtacgggtaaggccgtggattttccggaaccagtgcgtgactttataatgagcacccggtctgcgagggaggttggaatggcccctccaaactccgggagacgttgttttatccaagtgatgatgtaatgaataggaacatcattcttgtgctcagcgggcacgttatagagatgaccaggctccaataaagtcggttttcccatattctattgttttaaggattgattgttcataaatatttttatactctgaccaagaaattatttttttattaagccggttatttacgttgttatggaacgcgaaggtccagtactgaaagtcctccgagttgtttaatgtcaagggattttttgtaagatacgaaaaggcgtggtgctggcacctggtgcatggcagagactcgataaagttcagtatccattggatggcttcatatttttctttccagctaggagcgtctgaaaaaaagatagcatatagatgcaaggatcgccagtatttaggtccccaatgcaacatttataaccttttgaaaaatctcattccatatagaggtaaatattttttttccatggagaatttttttgcactcttgaagggattgcgccacatcgtcaaatgttttttgttttccatgtattttggcgtaattccagccagtatctgtgtcatggtccttaatgtcatccgctaactgaaaggcatgtccaaaacaatgggcagccctttcaatcatcccaatgtcttcaacggatccagttcctaaaacccagcccataataaacgcgatcttaaaaaagggaatggttttttctggagtgtctactaactgaccggaacccgcgctgtttagagagtggcttacaaaggtacacagcagcgctcccagttggttgggatccggaaaccttggacagtgttccttaatccagtcgatttgccggcaaatattttgaaatccttgcatggttagcgccagagcgctcatctgcgccttggctacgccaaagcgggcccacactgtatctttatttcgccgcttcacatcgttgtcaaaggagggcatatcatcgataatcaaagaagctacgtgaaagtactccgctgctagggcggcctctgccggataaataggcgccccaaaggaatgttgcaactgacaggcccgaacaatttccatcaggataatgggacggatatacttcccacctcttagagcgtaagagcaaggctctgttagttgtcccttaaagtccccatcttcaatagcattatttaagatggtctcaaactcttcactaaaggttttataatttttaggattcagtggatgtattccatgaaaaagcgcgacactacgcggtgctgtgattctaaaatacttaggtttgcgcgtataggatattaaaataataataagaactacaatgatggagatatagatgagatgcaacatgctgagttgtctccccgcagggaatggtccttttccgcgcttgttaacggtaccgaggaggcgttgaaatctttaggaaaggtgctgtctagtttggaatctccaattcctcccgtatatttaggtatataattattgtgtctagaaattgtttgctttgaggtatcaaaatattcagcctgaccgctatttcttttagaataattcggtatagggcttgagtagttggcaatactcttaaaccggggcaccaaggtaacaatattttccatataatgggtttgatacgctttgtttaaaaatgggcttaccggctttatgcttgttagttgtgcattgagtaccggtatgtcttctaggatttgtggctttatagaatgattagcaaacacagaatgtagtatattagatacttgtagcatatgtctatttgcggaaaattcctggtattctctgccgtgttgcgaatctttgggcggaaggggaccaagcatcggcacgtccgtgtaggtactggtggattttatgagttcctgctctatgttcggtttgacatgtggatttcctaaaggaatacctctacctgcaatccctttttctaccgacgcaggtagattgtgcgctaaacacaaaatattgtacacgtctttgtgcggaatatatccgttatagtgctggcccggcatctgatcgccaaggtgctgctcatgcttaatggtaccctttgttctgagtttaggaagatcctcgtacgaaaaaaattttgtgtgctcgctgaacctcgtagaaggaaccgaactattttttgggttttttaaggaaggcaatgaggaaggctgggtcagacaatttttctgtgtgccctttaagctagccacctgcggaaatgtttttttttccgtacgaacaacattgcgcctaattaggttttccgtatgggttgaaaaagcaggacgatgatttttaaaatgattaaaaagtttattttttggaatggagctgtacggctccagatcttgcgcatcgccgtaaccaatgtttttgtgctgagggttcagcataaaagaaaagttacgtagatcactgagttgcaatcccttttcagccttttcaggactattagtgtattcattgtatacaggcgcagctccatttttgttgccgcagtaccgggaatttagtatattatcagaataccggttatgacgcggcaaatcgctttcccaaagaggtggatctgacctataatcggctaacagctttgaagcataatcatgatacattgtatataaaagttaattattatattgagaaggcataattacttcttgtaggggtacaagaggctttgaatcaggcaaactgacgggttttgaatcggccggctttggaccggcaggtatctttttaggttgatcttcttctagctcattagacacggatgggggagaaataggaggaataatttcatctccgcccttatatttgtcatggatagaagaaacaattacatccatgtttgatttattataaatgtcgtttaactggtgatttaaaacataataatgcaaaaataatagggctacaatgcatatatatacgtaaatagccgtcttcgtttttcgttttttatccaccggcggattacaaattgcaaaaaatacaactaataccaccgctgtaatgattaaggccacaatgaaaggattttgaaaggatgttttgaacggttcgcacgtataaattttttctcctaaattattgatacccgcaataaaatctacattcattttatatatttataaattatgaaaaatttagagttacatctccgccggaccaatcattgctaaaatttgaagattcttcaaaaaggcccgactggttgaatgtcttctgctcaggtttccaaaaattttccaagaatggattttgaacaataggctcatcttgattttcttcttcaaggatattttctttgatatcaagaacagcttctttaaactcaggtgtatcttgattaaactcaggtttatcctgatcaatcgcaaaaatattatcttcttcagatatatcctgtttaatcgcaagaatagtttcttcctcaggtttatcctgatcaatcgcaagaatattttcttcttcaggtttatcctgaccaaactcaacaatatctttctcgctaaatccgtttttagtgtgaagctcttggttttgaagagaattatcaaaatctattttagttgttgtcctagaccgtggcacgggatagttatctaatggtttacttactatagtcctcgaatgtggcacgggataattgtttggtgacttgctggttagctcttggcttgttaatagttcttgttttctcaataattccatctctactacttctttttgatccgctggtgtctctttttggtattcttcattagaaaaatgttcagagggtaatgtttcaataaactttgtgagtggatagctgctctttgatgtagaagagcgttgaatttgctgataaaggagttgaacaagtcgccggtattcactctgtcttttttcatattttttacgtagcgtggagagatctgctaagagcgacttgttttcagatgttaattcttcaatttgatgaagaaggctgcgattgtatgaactaagtcttgcatacgtttcttctaattctgtctccggctccacataggcctgttttcgcagaaatttattgtatagttccattctttttttgagcagaaaggtaagactataatcttgcatttctttcgtaactttatggtagttttctttccggtttttgataataaagggcagcattttttctgttgtgataaaggtgcccagattgctaatgtagtcgcacagtagcaattccaagatagattctttcttttcaaggcttatagattggctgtattctttaggtatgaaagaatcaacaatcgttgttacgaagtttgaaaagtttaatgttttgctgttaatttgggtaatgttacaaaaatatttgtaaaaactatctagcattttttcataaagttttttattttgtttaacccctaaaatatagccctttacttgatactgatattccgtaacaatggaatgttttttgtatagtgcatttttgtataaaaagttataaaaaatgttgataaaatacgcaccaagggtttcaaaaatacttataacgtgggattcttcctgatccattatatcatatgtaatattattttaataaaaaattactgacgaataacatgcaaaaaaaatatgtttaaacttattttaagctagcacttatttaaaagtgttttaaacacgttttaaattgtatgttaatacacttaaaaattaagccgaaatttgctccaataaggattacttttatcaatgaccacctctttactataaacggctttacataattttaataatgctttagagccaaagctgaaggcagtgggaagcggcactgtactatggtaaaaatgttgccgatgttcatcctcgcggatgtacacaagtttcctatatcctttaaacacaatatggctaatttcttccacatactccttatcctgtttggaatagcggttgctttgacgggaaaaattcgacatacaaatagaggcatttgtaaaaatggaaacaaatgcgtttttacgaagattggcgggtaaatcggtatcatcttggcagcaaataatcatcgaaataaaacagtgacgattttggtaaaaaaactttttaaaaatttcttttgtaaataatgggtgcagttcggccgcgcagtcgtctaatattaaaagtaaacgaggattaagattgatatagtttaacgtaaacttttcatcctctgtaaggcataagtttttatacatatgaatgttctgtataataattttttttaaaagttgctgataaagcgatgtaatcttttcttcttttttttggtccgtttgttcagcctttaagcactccacttttgcaatatttttgttttccttttgctgtatatcgatcggaagtttatgatacaatgtttttagcatatcgatgttgtttactcgactgtagatggaggacatcatagtttgccgctgccagatggcctccaaaaagcgttcagcgcccttgttgtcattttttttttgcttatcggcgagccacaagcggtagtgtattagagttggatgtacaaaaccctcatatgaacgatttgagggttccgagggggcaaccactaaaatttgttcaatatggggttgcaggattttcataatatgtttaacgtacacggttttgcctgtttttgaggggccatatagcacagttgttttatctataaaatgatgtgctttgaactgtagttcaggaattagcttccctgaatgggtcgttagggccatctctatattattacaattctgcttttgtatataaaatttctttttcgagtttattattattgttgacccacatatctacccgtatcgtatcatcaggcacattgagcatttcaagcgcattatctaactgtttttttgtttttatcagctcgctttcttcatcgggggttaaattttctttactaagcagttgcttaattttttcttcgcagtcgtctataaaatcatactctcgagcttttttgatatttccagatgctttttctaggttttttagctccttaaaggaaagcagtcccttaatcccgctatccgtgtgaaaggttgaattatagatggagagccccggagcatccgggccagtttcttgtatattttttgcttttttgtggtaaatagtatttcgtaaaatctcttttcctatctttaggtcttcctcatgacggtccaaaatccgttttattatttcattattttgattaaaataattgtagcgctctctgttggccttaaagcttcccaggagtgtccagttgcctaattgaatggatgaaacctctgagaaaatctggtctttatatttataataaaattcatcaaccttttgttggttgctgctatccaccacatcataaataatgaaggcaaactctaggtcgggtttttctgggtagatgctttccgtagcggcccgcaactcttcgtaattatcctcaatgtaataattccacttataaaaagtatcctgaggtggaatatgctgcgaaagatatctagtaatttttgtgttaaagagaatgggtttaaacgccctcggattttcaagcatatgtttaatgctttggtgaagttctatattttgtaatatgtgggctgctgccctatagccctgtggggtttgggtgattgcatcaatatcggcctgaagctcattaggcacatttaatgttttttgcatgatgtgtaaagggatgcgctcaggatctgctaaatcggtgtattctgtgcttgtacaagtgcttgcacaggtatctacattggtatctgcacacatgcttgcacaggtgtctacattggtatctgcacacatgcttgcacaagtgtctacattggtatctgcacaagtatacgcactttgagcatgaagattaggatcaaacacaaaatgttctcgtaaaaagctatcgatcgttgttttagcttccttgcttttctgcgtctgggttttgcagctatctgctatagataaaattgtatttactaccgattcagagggaacatcattagtttcctgtttcaaagtatcaactaacgttattagctcactgagaagagttttggtcgtgtgggtaggttttgaataggaaggcatccattcctgcagagctttgaagacatatccaataaagctagtcattataagacgtcgaatatactgctcccgcaaatttgtaaaagagcaaaaggccaccctgctatcatttttgaactgtttgtaagggttcgtcctttggtaaagctgtttaagcgtttcttcggatatttcagtagagggatcctccaatacgtttttgagaagctcatcaatattaaattctgccatatcttagagtttattatatacatattaaagctttaatataagggggggtataacaatggacgaaatcatcaataaataccaagctgttgaaaaactttttaaggaaattcagcaaggattggccgcgtatgatcaatacaagaccttaattagtgaaatgatgcactataataatcatatcaagcaggagtattttaactttttaatgattatttcaccttatcttattagggcgcatagcggagaaacgctgcgaaacaaagtaaataatgaaattaaacgtcttattttggttgaaaatatcaataccaaaatatctaaaacgctggtaagtgttaattttttactacagaaaaaactttcaacggacggggtgaaaacgaaaaacatgtggtgcaccaataatcccatgctgcaggtaaaaacagcccacaacctttttaagcaactatgcgacacacagtccaaaactcaatgggtacaaactttaaaatataaggaatgcaagtattgtcataccgacatggtgtttaacaccacgcagtttgggctgcaatgtcctaactgcggttgtattcaagaattgatgggaaccatttttgatgaaacacatttttacaaccatgatgggcagaaagcaaagtcaggtatctttaaccctaaccgtcactatcggttttggatagaacatattcttggtagaaatccagaacaagagttggggaccaaacaagatccctgcggaaccaaggtgttgcaacaactaaaaaaaattattaagcgcgataataaatgcatcgcgcttttgacggtcgaaaatattcgaaaaatgttaaaagagataaaccgcacagacttaaataattgtgtttctcttatattgcgtaaacttaccggagtagggccgcctcaaatatcagagtcgattttactacgaggcgaatacatatttacagaggcaattaagatacgggaaaaagtgtgtaaaaaagggcgtattaataggaattattatccgtattatatatataaaatttttgacgccattttgcctccaaatgataccacgaatcgacgcattttacaatatattcatttgcaaggaaatgatacgctagctaataatgatagtgagtgggaatctatctgtatggagctccctgaaataaaatggaagcccacagatcgaacccattgtgttcattttttttaaagatgaagattttttagatgattttttttagttttttaaaagacgaaaaaattttttaaaagatgaatattcttaaaccccgcaaattacttttttttaggtactgtaacgcagcacagctgaaccgttctgaagaagaagaaagttaatagcagatgccgataccacaagatcagccgtagtgatagaccccacgtaatccgtgtcccaactaatataaaattctcttgctctggatacgttaatatgaccactgggttggtattcctcccgtggcttcaaagcaaaggtaatcatcatcgcacccggatcatcgggggttttaatcgcattgcctccgtagtggaagggtatgtaagagctgcagaactttgatggaaatttatcgataagattgataccatgagcagttacggaaatgtttttaataataggtaatgtgatcggatacgtaacggggctaatatcagatatagatgaacatgcgtctggaagagctgtatctctatcctgaaagcttatctctgcgtggtgagtgggctgcataatggcgttaacaacatgtccgaacttgtgccaatctcggtgttgatgaggattttgatcggagatgttccaggtaggttttaatcctataaacatatattcaatgggccatttaagagcagacattagtttttcatcgtggtggttattgttggtgtgggtcacctgcgttttatggacacgtatcagcgaaaagcgaacgcgttttacaaaaaggttgtgtatttcaggggttacaaacaggttattgatgtaaagttcattattcgtgagcgagatttcattaatgactcctgggataaaccatggtttaaagcgtatattgcgtctactggggcgtccagctataaaacgtgactggcgtacaaaaagtccaggaaattcattcaccaaatccttttgcgatgcaagctttatggtgataaagcgctcgccgaagggaatggatactgagggaatagcaaggttcacgttctcattaaaccaaaagcgcaacttaatccagagcgcaagagggggctgatagtatttaggggtttgaggtccattacagctgtaatgaacattacgtcttatgtccagatacgttgcgtccgtgataggagtaatatcttgtttacctgctgtttggatattgtgagagttctcgggaaaatgctgtgaaagaaatttcgggttggtatggctacacgttcgctgcgtatcattttcatcggtaagaataggtttgctttggtgcggcttgtgcaaatcatgaatgttgcataggagagggccactggttccctccaccgatacctcctggccaaccaagtgcttatatccagtcattttatcccctgggatgcaaaatttgcgcacaagcgttgtgacatccgaactatattcgtctagggaatttccatttacatcgaatcttacgttttcataaagtcgttctccggggtattcgcagtagtaaaccaagtttcggtacgcattctttgtgccgggtacaatgggtcttccaaaaggatctacaagcgtgtaaacggcgccctctaagggtgtttggttgtcccagtcatatccgttgcgaggaaacgtttgaagctgcccatgggcccccatctgggacgtgccctgaatcggagcatcctgccaggatgaatgacatgcacccaatatatgatggcccaccatatcatggaaaaagtctccgtactggggaataccaaaggtaagcttgtttcccaaggtgggggtacccgtatgcgggcgtactttattgtattcaaaccctactggaacataaggcttaaaatgcgcattaaaatgcaccaaatgtgtttcttcgatttgactcaaagtgggttcgggatcgggtttcccataacttttgttcacatttttaatgttagagatcctgctattcagcaagtcttgggccaatataatcttgtcggccttcccatcgttagcaataagacaaaaagctcctcctgatgccatatataatgttataaaaataatttattgtttttattaaatatggcggtttatgcgaaggatcttgataataacaaagagttaaaccaaaaattaattaacgatcagcttaaaattattgacacgctcttgctggcagaaaaaaaaaactttttggtgtatgaactacctgccccttttgacttttcctccggcgaccctttggccagtcagcgcgacatatactatgccatcataaaaagcctcgaggagcgcgggtttactgtcaaaatatgtatgaaaggggatcgtgccctccttttcatcacctggaaaaaaatacaatccattgagataaacaaaaaagaagaatatctgcgcatgcacttcatacaagacgaagagaaagcattttattgtaaatttttagagtctagatgagcttttacgcaatgttgtacagtgttgtatatatgtcttgtaagcatttgttgtagagtaataagtaaaagataaataaaaatgactattaaaataaagcccaaaccattaaaaatatttttatctgttagatttaatttaataaatggctcatggaatgtgtggtgcgccgctgcatgaggtgtggccgcatgggatgtggtcgcataagatgtagctacatgggatgtggcatttgcttgcatgtaaggatcatgatgtgttgggtcttcatcccagcaataatcgccatctttatctagctgaattgtataccccattatatatcacttattatttttttttaatgtttcatgaatttcattataggcggtgaaagggtcctcaggccccttctgtaaaagattatagagatcttcggacgctttatgtttcgtgcgaattaaggcgggatataacaaaagagagggccccagttccaaacaaattttacttagcgggctcatattttgcaccaagtttcccactacttgcgatgtttcataacgcattttaaagagctttatcataaaagtgttatgcaggccggtgtagtctggcctatagttaaggaaggggatttctctggtaccgtcaaacacgatctcaagtcctctagcaagcccgatcaaaatttcttcagcaatggatgagtatctaattcctacattacgaagcgtaagcatttctataacatcatctatttcctgcatagaggaatctattgtaggaattttaatatcatctgtgctgatttgttcattcccaagataggtaagcagcatattaattttttctagctttactagcttagtcttacgctcataatcatgatcttttttataaaaagagttgggatcaccgttggaccgtagatgattaataaggcggtctacttgctttgtactaggtttaatacttttttcactatactcgctttcagcatagtggtttttacgatctcttttagaaatagctgttttttgagatgcctcagactctgcatatttttttctatgcgtagaaagagaataaccgcggtcattacgtgaactactgttgcatgcaaggcctcggcgcgtcttaccgctgcgcacactgccattgcgtatactgccatcgcgcacactgccgctgcgtatactgccattgcgtatactgccgctgcgtatgctgccgctgcgtatgctgccgctacatacactatcactacatatgctgtcagtacatacgctatcgcggcgtatgccgccgtgtaccttatcgccgcccctacccgagggttttttagatataatactgtgtggggagtcaagcgaaaattcagggtcattaaagttaatgcccaatgactttgccaatccattaagctcttcatcaaaatgatcggtaggaaaactttgttgcttgcccatgacctgtttttcaagttcctccaaattggcttgctcatttatatggagattattcataagcgtcgtaattccagcaagatttgctccttctaaaaatgtggtgtcctccatcggatatactatactatttaaaagcttttaaataaaaatgtgtttggaagaaatgctctcttcaagcgtgtgtagctcagatataaatgcctcctcagaaagctttccaccatactcctttctcatcgtataggagggcgccggtttaatgtaggaaatccactgggaggtaaaaaaccggtacaacatatttagcagctcgcgggcctcccaccttttgggctccgtatagtgcacatcaacataagaggcggcgcatgaaaagctgcaaaagttgccgagaacgcccatctcaatctctcctcgctcattttcacgcatataggtgggcacgaattttgggacagtcttgaaatagagatgacatgtccagcatttaaagctagaatgggtaacccatttggaaacagtggtgaatacggagggtagctttttttcgacctcggcttcatcgtcattcgtatttaacgtatcggtggcagtttttttggattgcaagcattcttcaatggtaatcccggataagtataaaatattaggacaattagtttccataattttgatagttatttttatacaacatggatttaattaaagataaatggaggacgaaacggaactgtgttttcggtcaaacaaggtgacgaggcttgaaatgtttgtctgcacatacgggggaaaaattaccagccttgcatgttcgcatatggagttaattaaaatgttgcaaattgctgagccggtgaaggcattgaactgcaactttggccaccagtgcctaccgggctacgaatctttaataaagactccgaaaaaaactaaaaacatgttgcgccgtccgcgcaaaacagaaggcgatgggacttgcttcaatagtgccattgaagcctccattttgtttaaggacaagatgtataaattaaaatgttttcctagtaccggggaaattcaggtcccgggcgtcatttttccggattttgaagacggaaaaaacattatacagcagtgggtagacttcttgcaacatcaacccattgaaaaaaaaatccagattattgaatttaaaacgattatgattaattttaagtttcaaataaacccagtgtctccccgcgtcatcattcatttaaaaaaatttgcagctttgttggaacacatccctactccatatcccatacgtgaaataaagcctccattagaagactcaaaagtatccgcaaaatttatggtcagtccgggaaaaaaagtacgcattaatgtttttcttaaaggtaagataaatattttaggctgcaacacaaaggaatccgcggagaccatttatacgtttttgaaagatcttatcagcgtacattggcaagaaattttgtgcgtgttaccggtacccgattaaagaatgttttcattaataaggtaatcgactatgctaaaaagaataacaagaaaaataccttgaagaactataccaaagtaggtaggttttctgcatgtcacggcatggttaaaattgctaataatgtagtccacaaaagcattgctcaatacgactaaaaatagtaaaaaaaggataagtgctctttttatatccatatactttaaaacttattttttacactaataatttcctgcggccgcaatataaactgtaggtcatctataacgcccagacctgttaaaagtagagtactatgttttaagggatttaaaatatccgccgcaagaatgtgaatataattttcaaagtggtttacaggaatgcgtaagcgtttttttttgcactgcggttggtttagggtcgaatactggcaggaggtatatatattaataagaccgcggtcgatggtttcaatatcttcatagaattcaatgcgcggcgtcaaaagttttttaagatgttgacataactcatcatacgtgtaggactggaggggggaaagaagggtgtagtcaaagttaaaaatgtttttttgaagaacctttaaagcatgttccgcgtccgtggtttccaaaatatgttttatggtatgaatgtcatttaaatctacaaagtctgacagctttgtgtagaactcggtgacggaggttattttctggaaatcggttttttgaaaaagattttcaatgtgtttgcgggttgagttgctttgcagtccatacaagacatcaaaaaattcaatcagcaaaaacttatacaaatggttaatataaaaagctttgttggccttattctgctgaggatatggttcctctaggggatatagaatggcttggtctatatccctaggatcaatagtcaatgttgcgatgggaagcttttccagcgtagcgggaagagtttgggttggagcgtagtaaaagtatagcccggtttttccctctgaaagaaagcccacaaattctttttttatattttgcagcaccgctgagggtacgatttcgtactgtttatactgtttgttgaaaagggtaataaatttccaggtttcttcaaagcttgcaatctgggtgggccgcagatcaaagtcgatgggaatgtcgtcatgaatgtaggatgatagtcttataggaaaataaatagggcgatcggtgtctgaatcgataagtaaagcataacaaaagttatgcctgttgataagttttttaccaaccgtgtagccgggaatgtttttcacgtcatggatatcccaccagttatccttgcacataaactcgctcatagactggatgacctccatcacagggtcatcttcggtaaaaatatactgggcctcactgtttttcagaaatcttttttgctgggtgatggccattgggtagatcccttcgtccgtgtcaaagataatggctatcttcttcgatgggctaagaattttttgtattgtgctgggggacacctcaaacccgatgtcgccctgtttatctttaaaaaagacacagtgaaggtcgtagcatatggcaacaaggtccagaaagatgtcctgccatgtggtgtcccattgaagcagttggtttttttgttcaacaaaggtttgtaagataaggtttgccagctccgcgccgctggaaaacatgttgccggccccattccccaaaatatagtactgcggtgtgttggccgcctttgcaatttcaatggcaagggccttgggggcaagatccaaaattcgagcaagggaataaaaaagcccggcattgctaattccaagcatggtttgctccacccccacaatgcaaaaaatgtcgggctcttttatcgtatttaaaaacagttcatctgctatctggtggggtagaaaggcaatccggttcaccggtattttttttccataggacaaggtatgacgcgatgtttgtgtattaagatcctccaggtcttgttctacaaacgtgtgcttggtgaggcaggtattgttaatatagaaccgctttgtgcccagcagggccttcgtcttttggcagcacggcagacagtaatttagggggtggcggccttctagtaggcttagatgagggtagtcaggatgcgggcagctatagtaggcaggtaccccctccgtgaaattccaatactttactagctccttgcgcttggctggcggcatggacttcacctcggcctctgagtaaatgacgggtggccgtgggtgctggcataggacggagtaaaccgttgcctgcgtgtcgtacttgcgcaggtcatacaggtcggggtcctgttcttgaagcgcacgtagctgagaggctccctttccttgttgtttatcgtgcagttgagagagtttattaaccaaaattttgtcaggcccggtgatcaagttatctaaaaacacaaataggtaaacccaaagatagttaaactcttcctgggtaatgttaaacatttctattttgatatctgtaaccctatggtagatgcgaatgttgcggccgccgtagattgtttcccaccgggccgcaacatttgtgtcaaagaggtacgcatacgtgttttggagcaacgcaacattgatgtccattttgcgccccggaccggaggaaataatgatcatccgttcgatttcgtggggatcatacgaataaatcccctttttaaataaaaaattgtagaccccggtttgctggaggccccgcacggaaataatccctgcttgctcgtattcccgccaacgacttttgagctcggtaaatcccttgctagaaagcgtatagggccaaaaggtggacaccgacatggagctgatagaaatttggatgtcctcgttggagggaaggggcagactccctccacgaggaaacgcggcaggccccatatcattaattgtatgaataataggatttatgaaattatttagggtggacaccacggagttaaagtcgtggcgctcgttttctgaccaattgctttcgataaagtagtgcccattattttgtatggtaagaataaaggcctttttattgataaagcgtattaaaataatagtgggtacacggaatgttttattgctgaatttttcaggctccgtggaagttatgtggtgtttggaaaccacggtgggacctgttttactataaaagaacaccaccagctgaggaatatcgggagtagctggaaataggtcgaaaacattgcgcacattaatttgaatatttacgaggggtgaaattttaatcattgccgaggtgacggccaacgtgccgcgtgttagtctattcccctcgtacttggcaatgacttgttgtgctctggcatacgtaaagtttattagtttttgctctaggagaagcctctttttaagactggtcaaggatggagaaagagcaggatactgtttttccatttgtaagggagattgtaccaatagtttaaaggcatcgggggaaagaagaggccaatacttcataataaggccgtaatagagtaagtcaaattggtaattatcctctatggcaatggagatttggcgccgcatgggggccactagcgtgttgaggtctgctacaaagatgtgatgaatgttttttatgagctggaagctgtcgagcgcttccacatagagctcatctttttgactttccatagatgcgtcgatgttcaccccacccacctgttgaaactcctttttgtagtcgcgaatgtctaacgccaccccgctaccgcttaacaataggcgatacgttacctgaagcgcattgttttgaaaaaagaaaatgtgttgtctataaggggggatccctgtggcaacgtaaattttttctcgaatgtctttaaaagtgtcttcagggaaaatactatactcgctatacatcgtctcaatttctggcatcatcacgtttgtctcctcgccacgatcctccacaaaaagtttttcaaactcatctaaatcatcgctatctccacccaccacgtattgggaaagctttttctcccaatcctcgccgtaaaaattttgtaaaatttctttgtccttaggggttcgctgcaggtctttgcggcaggcctgtaacacgtttgcaggaacggatcccaaaaaaataaacgtcttcgtgtactcattttccacaggattataaagagtaactcgtagaggatttgttaaaaagtcattttggaaatccattatacccggtatagaaaataaaatttaaaataaaaaacggatgatatctatcatggaccgttctgagattgttgcacgggagaacccggtgattacccaacgagttacaaatctcctacaaaccaatgctcctctactattcatgcccattgatatccatgaagtacgatatggagcctacacacttttcatgtatggttccctcgaaaacggttacaaagcagaagtaaggattgaaaacatcccagttttctttgacgtacagattgagttcaatgatacaaaccagctttttttaaagtcgctactgacggctgaaaatattgtgtatgaacggctggagacgctcacccagcgtcctgtaatggggtaccgcgagaaggaaaaagagtttgcaccatacattcgaatattttttaaaagcctgtatgagcgacgaaaagccattacttacttaaataatatgggctacaacacggccgcggacgacacaacctgttattaccgaatggtttcccgagaattaaaactacctcttacaagttggatacagcttcagcactattcctacgagcctcgcggcttggtacacaggttttccgtaacccccgaggatcttgtttcctatcagaatgatggccccacagaccacagcatcgttatggcctacgatatagagacctatagccctgttaagggaaccgttccggacccaaatcaggcaaacgacgtggtgttcatgatatgcatgcgcattttttggattcactccacagagcctctagcgagcacgtgcatcaccatggcaccctgcaaaaagtcctcagagtggaccaccattctatgctcctctgaaaaaaatttgttgttaagctttgctgaacagtttagccgctgggctcctgatatatgcacagggttcaatgattctcggtacgactggccctttatcgttgaaaaatctatgcagcacggtattctagaagaaatctttaacaaaatgagccttttctggcaccaaaagctggataccattctaaaatgctattacgtaaaggaaaagagagtcaaaatctcggccgaaaaatcgatcatttcctcctttttgcatacccctggatgcctacccattgatgtccgcaacatgtgtatgcagctttaccctaaagccgaaaaaacaagcttgaaagcgtttttagaaaattgtgggttagattcgaaggtagacctgccgtaccatctcatgtggaagtattatgaaacacgagacagcgaaaaaatagccgacgtggcctattactgcattatagatgcccagcgctgtcaggaccttctggtgcgccacaatgttatccccgatcgcagagaggtaggaattctgtcatacacctcgctgtatgactgtatctactacgcgggaggacacaaggtatgcaatatgctcattgcctatgccatccatgatgaatacggccgtattgcttgcagtaccattgcccgaggtaagcgggaacacggaaaatatcccggcgcctttgtgatagaccccgttaaagggcttgaacaggataaacccaccacaggtctcgactttgcgtcgctgtacccctcactcatcatggcctacaacttttcgccagaaaaatttgtagcctctcgggatgaggcaaatagcctcatggccaagggtgaatctcttcactacgtctcctttcactttaacaatcgtctcgtggaaggatggtttgtgcggcataataacgttcctgataaaatgggattgtacccaaaagtactcatcgatctacttaacaaacggaccgcccttaaacaagagcttaaaaaactaggtgagaaaaaagaatgtatccatgaatcccatcctgggtttaaggaactacagtttcgccatgccatggtagacgcgaagcaaaaggcgttgaaaattttcatgaacacgttttacggcgaggcaggtaacaatttgtcgcccttctttctgcttcctctagccggaggagtcaccagttcgggtcaatataatcttaaacttgtctataactttgttatcaataaaggttacggcatcaagtacggtgacaccgactcattatacattacatgcccagatagtctttatacagaggtaacagacgcatatttaaacagccaaaaaacgataaaacattatgagcaactctgccacgaaaaagtgcttctgtctatgaaagccatgtctacactatgcgccgaggtgaatgaatacctgcgacaagataatggcaccagttacctacgtatggcctacgaggaagtactctttcctgtgtgctttacaggcaagaaaaagtattatggtattgctcatgtaaacacacccaattttaatacaaaagaattattcatccgcggaatagatatcattaagcagggtcaaacaaaactcaccaaaacgataggaacgcgaattatggaagaatccatgaaactacgccgccctgaggaccatcgcccccctcttattgaaatcgttaaaacggttttgaaggatgctgtggttaacatgaagcagtggaattttgaagacttcatccaaacagatgcgtggagaccggacaaagacaacaaagcagtccaaatctttatgtctcgcatgcacgctcggcgtgagcaactaaaaaaacacggcgctgcagcatcgcaatttgctgagcccgagccgggagaacgcttctcctacgttatcgtggaaaaacaggtacagtttgatatccagggccaccgcacagattcctccagaaagggggacaagatggaatacgtctctgaagcaaaggctaaaaatcttcctattgatatattgttttatatcaacaactatgttctaggcttgtgcgcgagattcattaatgaaaatgaagaatttcaaccccctgacaacgtcagcaataaggatgaatacgctcagcgccgagctaaatcctacctacaaaaattcgtgcaatccattcaccctaaagacaagtctgtcattaagcaaggcaatgttcatcgacagtgctacaaatacattcaccaagaaattaaaaaaaaaataggcatctttgccgacctttataaggaattttttaacaacaccacaaaccccatcgaaagctttattcaaagcactcagtttatgatacaatactttgatggagaacaaaaagtaaaccattctatgaaaaaaatggttgaacagcatgctacggctagtaatcgagctggtaagcccgctggtaatccagccggcaatgcgctgatgcgggctatatttacgcagctgattacggaagaaaaaaaaattgtacaagccttatacaataagggggatgcaatacacgatcttctcacctatatcattaacaatataaattacaaaattgccacgtttcagacgaaacagatgttgacgttcgagttttccagtactcatgtagaactgctattaaagctgaataaaacgtggcttattttggctggaattcatgtggcaaaaaaacatctgcaagcttttttggattcatataacaatgaatcgccgtctagaacattcattcagcaggctatagaggaagaatgtggcagtattaaaccatcttgctacgactttatttcctaatacttcttaagaaactctttaaacaaggacttcgcatggtcaaaggttctaaacccatggcccttatgattcgccaaaaaagcggtttcatcaagattttctaaccctttcacggatgaagaaataaggtgttcggcctcgtttgcccattttctatgattttttttcacctcgggttctagatctgttttctccatatactcattgtggtcatatttttttttgggaggaggcgtgggtggaggaatgggtggaggaagtacacccgactttcccgcttcaaccgttttataaaaaaatagaagcataatacaaagaataaggactatcgcaaatatgataaccagtgtcccagtcgagggcattttgttatataagtaacgtttttttttattttttataattcgaatgaagaaccatgttgaatagtcttctactcaaagacattttgttatacggtaaatgagaatttataaaatccgaatatcactatcatactgtttatctgagaaggtctcactgggtcctgtgatggagaacccatactctgtaatgctggggtttataatgtggtcaggactgacaagcacatttctgaactgcgagagttctaggtttagacgcagtcgtaatagtcgctgtatatttgtaataaatattagattgcgtatgaggcgagtgtcaaagcgatcctttccaatttgtactaaggtgggcttttgtattccaactcccacttgtttaacgatggaccagggtccttcttcccgattttgttccgtgatataggtcagcacactattttctgtatatgaggtatgatgtcgcatattaatacctggtgccattccaactggcggttgtgcaattcgggctgtaccgggacccaaccatcgtggagttttataaacatatcgttctagcgtatttaaaaattccttaaggttatttacgagtagcatgaagggtgctattaaaacaggtggatggtttataaccattgtcataaaccattgcattgcttcaatatcattttgtaatgcttgacggggaggcggggcaggtaatccacgtatgttgaataaagcggttaattgtgcaccggctgtttggggcgtaatattttgtattaaatttatcatcgaattggcttgcccggcatttcctataagatcgattaaattggttatttgacctcgatattgttgtacccagttttgaatggcagcgatgatctcaggggttggattgttttgaatttcaggtgtttgtattagattattcacttctcttcgtgtatcttcaagctgagtcctaaatgcatttaactcgcctataatttggtttctatcaataacatttcttaaacctcgaactgtttcagccaatcgtatagtacgcacaatttcatgtaaggcctggtttatgtatattgacatgggatggccccaccgctcacgtccacgttgaatacctgcggccaaactaggacctgcctcgtcataatcaaattgtgtaggataaaggcttccaaatagcactttattgaaaatttggtcagaaagaaatttagggcggcccatatttagcgcgttgtcccctctaaagatgcgtgacatgtatccggcgttgcctttggatagtaactcattcccatattgagtaatagagaccgagacataggggtttataagaagttttagcataaattctcgagtatttatggggggacgattcggaatgtttaatacctctgcaacatctggttgaggagccgtggtgtccagagatcgtactttttcagccgaaatgccgtacataagacaagcaatttcttcaaaactatagtcatagttgtaaatattggcaagtggtatagatcgcatcagcgcatttacattgataggtataatattcatatcaaacaagttaaatatgcgctcgcgctctctattagagccaagagtgcgtgtttgacctttcggcgacactattttgtgaatatgattgatttgctcctcttggtaagagctttccacgaaggaaattacgtcttgcaatgttttacgaagcgaatacactgcattcatccctattcccgctgttataatgggtttatcgtctctgttctcgctaataagattaactccaccaaaagtattttcattgtacatcatcactgttttaaaactacggatatttatgataaatcggagagcctgaatggcgtgggtataaaagtgttcaaatcgcgtgggagtaatttgttcgcgagcaactaccgtttcattatagtttttcatgataagctgtactccgggcatatctgagagctgtaccggatcatttcccagtaattttcttgtgccgtatagtagtttaaactcgggggagccgctttcaaggttcgggtaaagaagaggatcatatacctcattattttctattcttaggtcatgtaaataatagagcgaaagtgaaaatggcataagaggctccttattgtaccgggacatatagttttgaatgaagtgttcttctgtttcaagatagatgggatgatcggtaagctcgtgcaggacctccatggcagaatctgccagagtgtgagagcctctaatgatcccgtcgatcactgcgaccagtcgctttcgcacaacatcgctcgtattattttgtgcgtctcctaggggcataagcgtaacattgggacgaaatacgccgccaattccccgcagggccgcctgaccgacggatagtcctgtcgcaggaacattgttattattataataaataacggaatcattattggctcccaagagtgccgtcagattagggcgagctagttggacatttgtgtattgtataaattgttttagaagctctccctggctaataagaatattaaacattttgttaaatagtggaagattggctctataattttctttaaggtaaatgggaatttctgttaaagtagaaataagatgctgactcaggccctggcgattggtatccttaataagccgctgaagtataagtcccaaagacagaagaagcaccgactgctctgtggggtcgcctctatgaccaaagacgttgttattgcgtgctaagtcagggtgagcatatcccatctccatcactgcttggctaaagttcccattagcgaatgcattaataagatttagatatatttttccgctgggagcatcataaaatcgggtaatatatgaagctatgagctggttaaacaccatcatcatactacgattattttgaataccatagtctgatccgtataggcgataacgtcgaaggttgtttgcggcatcattgacattggcataggttctgagcgctatgttgtcccagtagctaagagtattttcctcctgggcgttgttggtacgaataagattggagagtctaaagtctcctagtgccacctgctctacacgaagtccagagttattctccaaagcatcgtaaaatacgagtctactgaatactcttccgtattgttcaaagcgttcagaggattggggattgttatttatttgaatattagccgcgtcccttctttgcgccccacctcgaagttgcagtacattataaggctttgtaagcaaggtgtaggttttattaatgatttggttaaccccctccaggcccaattcaccgccaggaagcggccttcctccggcatcggtaggtggtttaataagtttgtcaattaaatgttcttccaaccagtaaaatgagccaggattagatctattttcatagtattgaataatgtttttatcaatatgcgggcgtagaagatcaagaaaatacttcgtgtcggccatcaaagaatcaattaaggaaataagacctgtaaaatctaaatgcacttgagcggtgctggtttcagggaagcgaacttgaaccattttgttaaaactggaggtcatttcgaagatattggtcaacaggagctgcatgattcgctgattatctactaaataccttgcggccaactcttgctccggacgaactcctccaccagcaggaatacccacatatggtacaatccaagcaaaaagagtttctgtggttaaatttcggtcttgggctgctgcagccgcttcggtagtgggatcagggtacaccatagaaagccgcatattgatttctttaatgactaatcctggatttctaatctcagagatggccccgtgttttcttccgagccagtcaataagattggcgcggttcacgttggcagcttgtgtctctcgtaaccattcgataatgcttttttgaatcgtatctaggtctaaacctttaatgttattacgaaagttattaagaagtacgtaaatagcactcaataagttaagacctgtaataacggtttcatgaaacagaaatattttgttaacatctgtatctgccagtgactcagagccttgaataagttttgaaacgatttgaattttatcggtatgctcctttttgagttcattgatagcctggcgaatgagttcttggtaggaaattttgcccaattcttgttgcagactgggatcttcaaacatctcactaagctgtttcctaaatttttgtaccaaatcccactgggagttgggctgcagcattcctgtttggacatccacagagtctatattgtatagtgccgggcgccacttgggggtaggctgggttgaaggactaataaacctatcggagggaagtaattgtgaggattgtgtatagccatcctcatcaggaagaatggagtagttggtttgattcatcattccaaaatcattcatagttcgcgcttcctgaacaatgcgttgaaatttttcccattcggtgcgtgtaatgacaccgaatctgcggtttatttcatttacaaaatggataagcgcttttttggttgcttcttgttcaccatactctaagttaaagtgttggtaaatgacgtttatttctttgataagctgacgaatttcggtttctgagtagtcaccaatgttaataagctcaataggacgcataaagataatgcgaataagtcctgagaagattccttccagctcaggaagcatcgagatctgtacattttcatctctaaaggaaaacaacttttgataaaattcggcgaggcggggaaggcggaagtaaagctctgctgcctcgggaattacctcgggctctagctcatcggcaccccccaatatcatacgcgtgggtataagtttgtacacgggctcaggccgttcaaacatgtcgtaaatccctaatacaataaaaatcttggcggccatacttttcagcatgaaggtgaagaagacgtcctcggtttcccagcgggttgatagggcgtcgttaactctcacagtagagaggtagacccgctgagccgcttcctcggcagtctgtgcaagcgccatcctttgtcctccaatttctgattgatttagatttttaagtcccacggaaagcgcagaatgttgaagatattcaagcaaggttttatagatttgcaggggcgacatgggcaccatttgccgcagctcctctcccccaagcatgtccccaatccgggcaaaggcattgatgatatttttaagcgcctgaaagttagaaagagagcgcccgataaggtcgcgaatgtttttagcctggcttgctctgacgggacggagggtaccaacgcttcggccttgttggatttcagccgcaactttttcgtagtagtggcccgcaggagcattatccgtaaagacgttggagtcgttgcctgtggaggtgggaaaactttcaaagacttgtgcaagcgtgtcccctgttgtctcggtgaaccatcgtcctataatgcgcacgccatccagcatctgttggactgtttgaatagaatctatgttgtttacaaacgttttggtaatgtttttaagataaagatctagcccttccagagctcgatagaatcggcgttttacatcatactccagctcgatggcgcttacggttgccttccagtctacttcctgggcacctccaggatttgggcccacgtgtcctctggcaagatctacagccggagaattaatgcgcgcatttttttccgtatccaactgcatgaggcgtcccgcaatagcatctccgagaatagtggcatagttttcctcgtaggattgaaactcctgtttgttatgcgttaaattggagtaaatctgggccacataatagtaatacataaaggtgttaattgcctggttgaggtcaacctgcgatcgcgcggccttgctgagcccaagctcttcaactgttagggcagcaccgcctacccttgtacactcgcagtcctcctcgcctccatactttttttgcacaatatcggtataaaaatcaataatctgtagcaagcgagagcaggagtcataaagatttttaaaattagggtcggttttagatatctcctccaaaacatttttaacaagcgtaagctgtgttaagaaggtttcgcgttcttctcgtgcggccgcattggtgtaaaagccgataagacttagatcaagtgcgatggtgcccatatcattaatgcgcgaaagagcatctcgaagcctcgttatgttcggcgtcaaggcaatttctttaacaagtttgatgcctatttttttcacattttccaaaaagtcgttataggcttgtgtgcttttattcaaaaattccatgaggatgtgctttctatccagtctttgcgcttcaatcctcctatctagtggcgttttctcctcatcgcccccctttttggcacaactgttctcaaggattttgtggcgttcattaaaggtctgtcgcaacaggttcacggctttttcaaactcagcaatgttttctgcggagacaagaccactaaaccttttgaggtcaagctccttgtcaaactccgcccagtttttgctttgaaggtactgttcaaccttgagtcctactttctggagagccttattaattttattcgcaacagacgcagcaatacctagattacaaagtgtgtacgaaagtacttttccaaaatttttggttcccaagacactatttgtatcatttaaaagtttaataatatccacctcatccgtctgcagtttatcaagttccttttgggtgggagttaaaatattgtcaataaaattcgttaaaatgttgatttgcaggttttgttcatttaaaagtcgacgatatactgcttcaatcatggtgactgcattaatgacttcctcattgggggctgctttggttacctccgtcaccatgcgctcgtgaagttgcttaatggcgtcgtttaacagcttgatattttcaagtgtattttctatactgccgtgtacatcaagatactctgcgcgcagtccatgagttagggagttaatgtacagaactatttgtcgacatatactggcggccccttcggtggtatctataagcttatcctgacctaaatcaataaattcctggttaatggcgtctgcaatcattttacagacggtctcctgtttttccgcattttttacaaaggtggaaccggctcgaggatcgggcagttgttttttgatatctttaagaatatcttcgatgggctgctttgtgtctactttgaaccctattttggcaatcgccctgataattccttctataatccgcagctttgctttactcgatacggagtctatgtgataatctttaatgtgttgtacaggatttttgtcccccccgccattaaaatatcctccccctgaaaaaggacgagtttgtctttgtatatgatcctgtaacttcgcatatatatttgcttctgatgaaggcagtggtctactagaggttgaagatccacggttacccattataataaaaaaaaataaagatttaaaactacaaatattttgctgtttataaacccaatcatataagactaactaaaacattaaatgtaggtgagataaaagcttattttttttttaaaagtttaataaccatgagtcttaccacctctttttcttcttcctttagaggggttccataaatggtttgaataaaattatgtgctctaataaccttgttaaaatcaggtgcctttccatattgttcaatatgttgcacagtcttttgtgcaagcatatacagcttggagtctttaggtacctccgatgagggctcttgctcaaacaacgtttcaaaggaggatgtgcattcattggtttcattatcatttttttcatgaatgttctccgaagatgctgaggattccgtctcctcttcaaacagcacatgcagaatcatattccattcttcttgagcctgatgttcagtatacccttgccctgcatatatacgagcagatttcacaatatcatacttaacagtactaagcaatgtttttatagcggtcgtaacaattctaccgctattgataatctcaacagaaaaccaattatacaggctacccgcatgaaacacaacttgtgaagatgatcttaaatccgttttgaagatgacctccattttcatggatatatttaaaataaaatccattcaattttaaaattataaaataataagaagatgccctctaatatgaaacagttttgcaagatttctgtatggctacagcagcacgatccagatttattagaaattatcaacaacttatgtatgcttggcaatttatccgcggcaaagtacaaacacggagttaccttcatttaccccaaacaggcaaagatccgcgatgaaataaaaaaacatgcctactccaatgacccttcacaagccataaagaccttagaatcactcatccttccattttacattcccactccagcggagttcaccggggaaatcggctcctacaccggagtgaaattagaggttgaaaaaacggaggcgaataaagttattttaaaaaatggagaagcggtcctagtaccggcggccgattttaagccctttcctgatcgccgactagcggtctggatcatggagtcaggctctatgcccctggagggtcccccctataagcggaaaaaggagggtggggggaatgacccgccggttcctaagcatatctcgccgtatactccgcgcacgcgtattgccattgaggtggaaaaggcctttgatgactgtatgcgtcaaaactggtgtagtgtcaataatccctatcttgccaagtcggtctccttgctgtctttcttgtcgctcaaccatcccaccgagtttattaaggtactgccgcttatagactttgaccccttggtgaccttttatctacttcttgagccctataaaacgcatggggatgactttttaattccggaaaccattttattcggccctaccggatggaatggtacagatctgtatcaaagtgccatgctggagtttaaaaagttttttacccagattactcgccaaacctttatggacatagccgattcggctactaaggaggtagatgttcccatatgttactcggatcccgaaaccgtacattcctatgccaatcacgtgcgtactgaaattttgcatcacaatgccgtcaataaggttacaacacctaacctcgtcgtgcaggcctataatgagctcgagcaaaccaataccatacgacattacggccctattttcccggaaagtaccatcaacgcactgcgtttttggaaaaagctgtggcaggatgaacagcgatttgttatccacggcctgcaccgcacgttgatggatcaacccacctatgaaacctctgagtttgcagagatcgttagaaatttacggttttcgcgtcccggcaataactatataaacgagcttaatattacaagtcccgctatgtacggcgacaagcataccaccggagatattgcgcccaatgatagatttgccatgttggtggcctttatcaacagtactgactttttatacaccgcgattcccgaggaaaaggtaggggggaatgaaacccaaaccagtagccttacagacctagttccaacacggctacactcttttttaaatcataatctaagcaaacttaaaatcttaaaccgcgcgcagcaaacggttagaaatattctttcaaatgattgtcttaatcaactgaaacattatgttaaacacacgggaaaaaatgaaatactaaagttacttcaagaataagtatgttgatacctgtggtgtgttttacctgtgggtttcctattggaacctacgcggcaatttttgacaaggctcgtaccgagtatattaaaaccaaaatgggcggaacattgccgcaaaatatcccattagatgcttctctccagattgagttaaaagacctcattacagctctgggaatcccaatgcgggtgtgttgtcgcactcatttaattactacgttggattatcgtaaatattattaatatctaaaattgaaaaaatatttttaatgttactagtaaaaatgactacacacatctttcacgcagatgatctcctacaagcattgcaacaagcaaaagcagaaaaaaatttttcatctgtattttctttagattgggataaattacgcacagcgaagcgtaatacaacggttaaatatgttacggtcaatgtcatagtaaaaggcaaaaaagctccgctaatgtttaactttcaaaatgaaaaacatgtaggaaccattcctcccagtaccgatgaagaggttatacggatgaatgctgaaaatccaaagtttttggtgaaaaaacgtgacagggatccctgtttgcagttcaacaaatacaaaatctcgccgccattggaagatgatggtctcactgttaaaaagaatgagcagggtgaagaaatataccccggcgacgaagaaaaatctaagttgtttcaaattattgaactgttagaagaagcctttgaagacgctgtgcaaaaaggtcctgaagccatgaaaacgaaacatgttataaaattaattcaaagaaaaatttctaatagcgcggttaaaaacgcagacaaacctttgccgaatcctatcgcacgcattcgtattaaaatcaatcccgctacaagtatactaacaccaatattgcttgataaaaataagcccattactttacagaatggtaaaacaagctttgaagagttaaaagatgaagacggcgttaaggccaatccggataatattcataagcttatagaatcgcattctatacatgatggcatcattaatgctagatctatttgcatcagcaatatgggcatttcatttccgctttgcttggaaatgggagttgtaaaagtttttgaaaaaaataatgggattgatgtgaactccatttatggctcagacgatatttcaactcttgttaatcagattgctattgcttaaacaatttgctcaaaacaagcttataaacgtttcttaggtatgcgatacgtaaatcctaattctttaataagttctttttcagtagtgatttttagaggtactaaagtttgatttttaaataatccatactgatttagcttataattctttttttttaacgcagctcgaattcttattaaataagaaacgggacccgtaaaatgaagtactgcgtatgacttttcctcggctaaggccgtaaaaagatcaagttgatatgtgttttttttccattcaataaaaagtacacactttcgttctccgcagacttttacagaaaaaaaaagatcctttatgcgaatgttggacaggacgtgttttaaaagttttttttctggaacaataataagaagatccacgtcattaagcattttctcttcgcgtcttaagctaccaacagcaacgatgttttttgataaaatttttataagttgtccattatattcaaacgcaagtcgggagcgtaagtcatttacaattttttttccttgaataagcgttaacattttatatttaatattaaaatcttttcattttatatattatatacgcaaaatggcacttgatggttcaagtggtggaggctctaatgtagaaacattacttatagtagcaatcattgtggttattatggcaatcatgctttactatttttggtggatgccccgccagcaaaaaaaatgtagcaaggctgaagaatgcacatgtaataacggaagctgttccctaaaaacaagttaaaacatgcaattatatgcatgcatataaacgcatgcatataaacgcatacatataaaatgcgtaaatactatataaaaaactataacatatcaatcaaggaatcaacacttttataattttccgtaatatatttttcatccataatgatgtcagagtacatggtccctatgcgaggaacagagcccataagggtaggcgcggcaataccgtaaatgggattcacggcggagtcaaccgcagcatctgtcaagacctggactggagacgacaaggccattcgcaacaacacgttggaaggctctcttgcattaagccctgccttttctagagaggtaacctgtcccgttcttgtcatgagatctgcgtacatgagtaaatgacgatggttgggacccttgtcccccataaccgttctaatttcactaataattttttgccgtgccgcttctatgccgtaaagctccatggtgtctcctatagaggacgatacgatggtgtatgggtcgatgttatcatcaagcattgcgccaaaaatattagtcccgtttgttttgatggcgtagatattgtctagtcttaccagtttcccctgggcatccacacggtggcgcataagcttaacaacattcgcatttttgatgcctggtattcctctaatcgtgctatttaatagtttatccaccacatttacggcaattttttcatccgtagccattcgggtattggtactgcgtctaaaggcgctttcccgtaggtatatgcgaataatgatgggaatccctgaggccgtgttttccacagaatgcatgatgtaggtgttggggtgtttagctcttagactattaataatactttctagactaatgctttttaatatcatggttgttttgtttaattccaagcggatacaccagtttgcaatatcctctgggggctgtagtagaggatggttttccagaaaatccgtcatccattccacatcacttgcaaaatcggggtacatcacatttttttttgtgcttgaatacgtttcgtacaataggtgccactgcaatatcaaccgttcgaacgttataagctctatgctgttagcaatttcttgcgcatatgttttatttgtttccacttccgggttctttagacgtaaaagcatttcagaggattgttcagcctctacgggcttcgcgctaaagatctcctggggccgcacaattcccgacttgttggttcccccggccacggaccggtggtgggagtccagcatatattgtgtcaagggctctgatacggactgcgccgccaggattcccactgcctcaccgtagttaataagactttgagtatattgtagccttatgaggtccaggatggcactcatctgctcgcaggtaatgtttaatgttttaacggttgccagttcgatgcgaataagcatgcgcatcagagaggcagcccgtttaagataaacgggtatgggcgtttgtagtcgttcctgaatgttgttaataaacacgtatggaagatttttgcaaaacgttttgaccatcgcgtatttttgtagaatacttttttcgtcgaagggaagcacgccactggtggagctcagtagaatgttttttacgatgctggccacgtttaccggcacctgtctaacatctgtaagcagctgactgaaattaaaattttcgacgtttaggaagatctgtcgatatttatctctatcctttttaaggcgtgaaaattcttcttcaaacaagggcgattgtatcccggtgtacttgaatttgtcttcaagttcctggtccgacagcatgatggtttcaaaccgtacggtttcaagctggcgcgcatcaaggccgtcctctccgtacaactgctgcacaagacgcgtatcgatggaaacccgtcggtaataatccacaatacaggattgaaggccaaagatggctttacggttggcatagcctgtggatgatgtcgataatgctttgttgatcaagtcgaatcttccattcatttccccaaagataaattcaggggaggtaaggcccgcaatatagctgttgcagatgaacccgtaggcctgcgcctccagggcaaacctggggtagtacaccagggtcctaccgaaggaaaactggggttgaatgcgttgtgtattaatttcaatttggccgatgcccgccatgatgtgaatcatattggggtttgagcccttggcgccagtggccaccatctgaaaaagcccattggtttccggattaatggaattcataatcggctttaaaattctatcgggaaatttaagcgcattcagctgcaatttttcgtagaagtcatgcgttgtcaggcctataggcggcatgatgtctccatgaagcagccggttgtttatttcctccgactcaagcagcagttcattgataatttcttggacctcctgatgtgcctccggggttaggagcatgtcggccgtggacactgtgaatccggcgttgcgcacgtagtttagggcgagctgctgggtcgcaaatatcattttcaaggcctgctgcggcccatacctacgcgaaataaggtgatagattccaccggaggaacccgctccgacggcctttttgtcaaggacgccttcaatgagttcgccgttgcgtatttgtgtagagatgtcctgcttgttataatgcatgtagggtgcatacacttctgagtaccatgtgggggctcgttgataattgatgggggtctgcctcagtagcatagatacaaccgatttgccatccagcaggtcagttggggagtagttggcaaaacaaggtgggtcggtttgggttgtttgaaacaaccccatggcgtgcagcttgttcatcacatttttccccatgggggtgttcgtgcgtgtaagcaaaaagcttcccaccgtggagtcctgcacctgcccattaacgggacccgagctctttgtggaaatgaaccagtttcgcacagaacaaagtagttcggcctcaacgcggctcatgacgctccagggaacccagagattcatctgatccccgtcaaagtccgcattataccaggcacatgcgctgacattcatttgaaacgtagaaatttttgggttttcaagaacgacaatccggtgaacccctatgctgcttcgttcgagagaaggctggcgattaaaaaacgcgacgtcgccagtgacgacgtcacggtaaaggatgtctcctacctccagcctaaagtcttgtttgagaccctcaatgtcgtgaacggattgtgttatttgcttatacactcttgaacaaccagggtactggcgctttccatttaaaaaatagggcattaatctattaatattataatgttgcactgtttccgcaacttgcagcgttcgtgcaaaggaaatgggatagccaacctcgtccaggtgaaggtctgagttcccgcagatggtggaccggctgatcgaccatacctggctgcccagtagggatttacgaattcttccctccttgcgaggaagtcttcgcatgatggagggagcagggcgtgcccccatgacgatcccacgctttcccgtgcctccctgggttgcggtggtggaaacggaatccaacaaaaagttatagtaaagttgctgtatggtttgcaaattgcggtcaatatttaaaggtattttttggccgcgcacgatttgtaggtccttcgggatcagcagattctttcgaaccagatactgaatcacgttgttaatgtcgtgaaagctttgggggcctgacccgattcccaatctgatgccaggtcgtatgctgatgggggggatctgaatggccttaagcacaagtttttcgggatgggagtttttacttcgccccagttttacaacggtgtcgtaggttacgcgcgaaaaaatctctctgatgatctgcgggtacagtttgtcaatcttgccctgctgatccgcccaaaaggtaaaataatcttccgagtccttaacaattttggggtgtactgccttacagacgtagcactgctttccttcggtttggcttgaagccgcttcaataagacgcttaggcctaataaggtgctcgtacctctttaggtcaacgatgggagccccgcagttgagacatataacccttaaccatcgtcgtatttcggcgatgaagagcggctgaagcaccggagcatgcatctgcagtatcccagggtgtcccatacattgcttgcgctggtgtgagcaagtgatgcatttataatggtgatcggtggttcccattcgcgcatcatagatacccccttcggcgggaagggtgccctcaaataaattagaaatggtaacctccataacgccttgcctcttatgatcattgtcaccggcaatattgaactgaacggcggctatttcggcatatccagcctccatatttttgctaaatacataataaaacttcaaatgttaaaaaaaaataacatcggttggcatatttttttgttaaaaccaagtgttaaatgatttctaaaacacttatcggttcacgaaaacctaccgcacgggcctgaagaggaatgccagttttgggggaaagctcggcatattccacggtaagctcttttccataaagatgttttttaaataaggcgggcgtgagtttttgaaaaagagcataacgatccgcgtacgtcaaatgcttaggagtgactacaaaccgctttttgtttggcaattcgcaaacccataaaatggcgcctaagtcctttcccttttttccctgagtatagtccactaaaataaattcagcgtctagcagcggtttcagcttggcaagatgcgctgagtggtagttgttgtatcccggctcatagggcccattggcattgcgtacgatggctccctcgtagccctccttaataaactgcgccttaagcctaagggcctcatccacattcttcacgctaaaattttcaacttggtggataaaggtaagatcttccttctgtttaaaaatatttgttaatagctgttgtctcttgttggaaggcatttgaagctgatcactccaaaaacagtcaaacacgtaaaagtgcagctcggaggaatctgtcttcgcattcgcctgccccgcgatccattgcagaggtttgcggtgtaaataaagctcaccatccaaatatactctcacgtctataaataaataaagctgtttgagctcttttttaatattgtcaagacctaaaaattcctttttcgtgcgcgaatacaagagaatgctaccatcgccctgctggcaggccacagctcgaacgccattacgcttgcgctgcacgatgggatctgtttcttcttcaaaaaatgtcttaggaattatattaaaatattttaccagcataggggggataattcctctatttgtgtgggctccccgcttttgtctggcatggcgattatatttactaagggcgtccttgaatgcctgatggactaccgttgtggcattttttttacccaagttttttccctcggtaacacgtgtcatttttgatatccgcaccgccccttcttccacaaaaaattttgtgaaaatttcagcaacggcgtcttttacatctgtggaaaacatctcatctgtgatgggaatgatcgtgttgtgctgcaccacttgcacacaaataatccatgaggccttttttccgcttttcgtttcagactcaatcggaggaaaacaaaaaatgttgtttgaatattgcccaggaaattgatttagcatggttttaacaataaaataagcctatcaatttttttataatttgaatagttattccaaattcaatatggcttctttagataatttagtggcacgatatcagaggtgctttaatgaccagtctcttaaaaatagtactattgaacttgaaatacgttttcaacagataaattttttattattcaaaaccgtatatgaggcacttgtggcacaagagatccctagcaccatctcccacagcatccgctgcatcaaaaaagttcaccatgaaaaccactgccgggaaaaaattttgccgtcggaaaatctttacttcaaaaaacagcctctcatgttttttaagttttcagagcctgcatctctgggctgtaaggtctcgctggccatcgagcagcccattcgtaaatttatcttggactcctccattctcgttcggctcaaaaatcgtacgacctttcgggtatctgaactttggaaaatagagcttaccattgtaaagcagctgatgggaagcgaggtctctgcaaaacttgccgctttcaaaacgcttctgtttgacaccccagagcaacaaacgacaaaaaatatgatgacgttaataaacccagatgacgaatatctttacgaaatagaaatagagtatacaggaaagcccgaatccctaacggcggcagatgttataaaaattaaaaacacggtgttgacacttatttctccaaaccatttaatgctaacagcctaccaccaggccattgaattcattgcctcccatatactgtcctcagaaatccttcttgctcgtattaagagcgggaagtgggggcttaaacgcctcctcccccaggtgaaatccatgaccaaagcggattacatgaaattttatccgcccgttggctactatgtaacggacaaagcagatggaattagaggcatcgccgtcattcaggacacgcaaatttatgtggttgcagaccagttatacagcctaggtaccaccggcattgaaccccttaaaccaaccattttggacggtgaatttatgcctgaaaaaaaagaattttatgggtttgacgtcatcatgtatgagggcaatctattgacgcaacaggggtttgaaacaagaattgagtctttaagcaagggcattaaagtcttacaagcgtttaacataaaagcagaaatgaagccctttatttcgctaacaagtgcagatcccaacgtgctcctcaaaaactttgaaagcatttttaagaaaaaaactcgcccatattctattgatggcatcattttagtagaacctggcaattcttatctaaatacaaacacctttaagtggaagcccacctgggataacacattagactttttggtgcgaaaatgtccggagagtttaaacgtaccagagtacgcgcccaaaaaagggttttccctgcatctactatttgtaggcatctccggagagctttttaaaaaattagcgctaaattggtgtccaggatatacgaaactattccccgttacacagcgcaaccaaaactactttccagtacagttccagccatcggattttccattggcatttctttattaccacccagatacctcgtcattttctaatatagatggaaaggtccttgaaatgcgttgtcttaagagagaaatcaatcacgtcagctgggaaattgtaaaaatccgggaggataggcagcaggatcttaaaaccggcgggtattttggcaatgatttcaaaacagccgaactcacatggcttaactatatggatcccttttcctttgaggagctggcaaagggcccttctggaatgtacttcgccggtgccaaaaccggcatataccgcgctcaaacagcacttatttcctttattaaacaagaaatcatccaaaaaataagtcaccaatcctgggttatcgatcttggaataggaaaagggcaggacctaggacgttacctggacgcagggataaggcatcttgttgggatcgataaggatcaaaccgcgcttgcggagcttgtttatcgaaaattttcgcatgctacgacccgacagcacaagcacgctaccaacatttacgtgttgcatcaagacctcgcagagcctgcgaaagaaatcagcgaaaaggtacaccaaatttacgggtttcccaaggagggagcttcttccattgttagcaacctgtttattcactatcttatgaaaaacacgcagcaggtggaaaacctggccgttctgtgccataagcttcttcagccggggggaatggtgtggtttaccaccatgttgggagaacaggtcttagaattacttcatgaaaatagaatagagctcaatgaagtatgggaggctcgtgaaaacgaagtggtcaaatttgctattaaacgtctctttaaagaggatatattacaggaaactgggcaagaaattggagtcctgttacccttcagcaatggcgacttctacaatgaatatcttgtgaacacagcgtttttaattaaaatatttaaacatcacggcttttccctagttcaaaagcagtcctttaaggactggattccagaatttcaaaactttagtaaaagtttgtataaaattcttacagaagccgataaaacttggacaagcctttttgggtttatttgtctgcgcaaaaattaaatattttttcataagaagtactacccaggttttaaagaaatagctaaaaatatcatatggatactgccatgcagcttaaaacgtctattggtttaattacatgtcgtatgaacacccaaaataaccaaatagaaactattctggttcaaaaacgttacagccttgctttttcagaatttattcattgtcattactctataaatgctaatcaaggtcatctgattaaaatgtttaataacatgacaattaatgaacgactgcttgtcaaaacactggattttgaccgcatgtggtatcatatttggattgaaactccagtctacgaactataccacaaaaaataccaaaaatttaggaaaaattggcttctcccggataatgggaaaaagcttatttcattaatcaaccaagcaaagggctcaggaacacttctatgggaaatccctaagggtaagccgaaggaagacgagtcggaccttacctgtgccatacgggagtttgaagaagaaaccgggattacccgcgaatattaccagattctcccagagtttaaaaaatctatgtcatactttgacggtaaaacagaatataagcatatctacttccttgcaatgttatgtaagtcgttggaggaacccaatatgaatctttctttacaatacgaaaaccgaattgccgaaatttctaaaatttcttggcaaaatatggaggctgtacgttttattagcaaacgccagtcattaaacctggagcctatcatcgggcctgcatttaattttattaaaaactatttacgatacaagcactaggatgccgcattaaaatgccacataaggtaatacactaggaatgtcgcacacgcacaagaatacaacgtcgccggagatttattatctagtacacgttttatgtatgtacaatccgccttcatttaatatattgagcggatgtactatgtatttattttaacaaaaaacattatttttttttaatcttcatcatctgtttttataaactcagtaatatcaaaagtagcttgtggggtttcagagggttcaccttggttatcctccgtgaggataacatgttcttcaggttcgtcgtcactggagaacccatcatttaattcctcttcactcaacatctgtaaaaaatcttccaagctttcgctatcgttaaaatcctcatcatccataagaataatggtaccttcctcatcgtttcctccttgtttcgtgtctaaataggcctgcatggcatttgcaaaagtatcaaaataggctgagtcagattgctgttccaaaatatggccttgcgtattaaatgtggttgcatcgttgttaaatgcttgcaaatacagtaagggatttatatccattattattaagcaaaaaaaatttaaattatttttcgaccgatgttaggtaaaattaaacaattgctataggtgttaagcaatgtttattgattttaagtactcaacaaccatgatgtaaatactatacagcacttttggatttttaatcaaatccagattaatactaacttcttttgtgatacagttcgtaataatagtatcctgctcatcgttttgtaagatttcttttaatatatttttttttaccgggatactaagcaattgattattttcttttaaaaactccttttgatattcaatcgtcttattcattgaatatttgtatataactataattacaaatgttcaatgaattgttattcatgtcgggagatggctatttaaaaatcatgtcctatttttctttgctcaataagcatccaaatattttcatggcgttttattaattgttcattattgaacgtatcacaaagatcatttataaattgcagatagtttattatttctttcaagagagtaacaaacattacttcagcagaacatataataggtaattcagtggcgttaaaagaattttgatcttgttgatacgccaatggcgaggacttaaggagatttgggggtcttgcccaaaaccctaggctgctgttcttgttttttagggcgtcataaagaaatgaaagcacattgcaaggcttaagccgcgacatctccttccccttgggccctttccatatttttagatctaagatctcatccgagcttatagagtaggtatagtaaagtttttcaaaaaagcatatctgcttgaagtcttttttagaacgactttcaagaagcatttctataatgttaacaagttttgttaggtttaaggcctgttcctgtgtaagctcctcttgcacgtgatagactgaaaaagtgtgcttaggaatgaaaatactccccgtggcactggcctgttgtctgccaggtatatagtacacgctgctgttagcaagctgtaccggcacaatttgccccacttctgcaacattattttgcgattcggacgagggtatgacaatagttacgggttcagtcaataggctttcgccgagaataatattactgtcatttttaataattttaacggccgctattaaatcaaaggcatttaagtaagaaacaacagcagaaaatcttacatgcatatatcctcttccgctattattcgtacgcataataaaacaaggggagcgttgtataacgccagtaatattaagaataaaactgtttttgaaacacttacccacataaatgttttcaagctccttcaaaagatgagcctccacatttgtacaaaaattggtaggatcatcaatattcaacgttgtctcaaaaattttttggtcgatcatatctataatatattctgtctatttcaatttaaataatatacgaataaataacgagattattttattaaataagcaatggtgtatacactttgtatttactttgagatatactttgtgtatcacaacgtgccctaagatgtgtgcacaagtgacggcattttgtcgttaaaaaggtaaaaccagcggattccatcctgcattccatttggttgattacgagcctccatttctttttgcaaaaggttattgcgaatgagtaagcagagcttgatggcactaatctttgtaaggtttaaacttatgcccaattggtcagcaattttttgttgctcctcccgtccgcgtgtttcgcatacggctccccggtttagcatgcgaatatcagtaatctcattcttttttaaaacctggataggtgggcggattttaaatttaagggcctttcccttgctttccatatagcctatgacgatgtcgttttcttttcgtttaacattaatattaagcatataaagcggaatttcatgccaggttttatcttctcgcgaggtaataagtcgcacggagtcctccgtggcatagcccactagagtgttgtcatccccaggcacgtggcttataattttaaaaatgtccggaaatggctgaatatctttttttgaaaaagcgatgaaaaactttttataaacctcgacaagggcccccatacctgcaagattatctataataagtgcttctagcatcgtatagtgaaatgaagcggggtagtggatgagtacctgctccattggctcatcctgaaaatccttctgaaacttttcatacaatacttgaaagggttctttggtctgcgagtgttcgaggtatttggtaatacggatgctgtgcatcgcgggaggctgaaaatcccgaatatatgtttcaatatctaataccggttcctttttatggttaagcaccgcagcgacgtacaaatgctcaggctttgccggcacatgcataatggtgcaaagacgattctgtatccataattccttgcactggttttttgagtagcatagagaaatgagcgccagcgcgaagttgtcctctgagaagagtttattatcgatggtaattccctgtatgagcttgggagtggaaacagccttccatagctcggagtacgtccacacggggcgtgccataaacaaagatataataatattagaaattgtttttacctcttgctccccgtatccataggcctcaaaggtattgaggacggtggctccgacgtttgccggcgtgatggatggactaaggggcagactttccaacataggcttatcaatcttaatctggttggtgaacccatcaatggcgtgctttcgcagcgccttatccccctcctgtattaaaatgtattcttttaatttttgtgcgtacttagcgagctctggccctccatcgggtgttgtcgatacgtacaaataaattgtcacgttgcgctcactgggggggagctccatgtgtgaattttttcgcaccaccctcccaaatacctgaataagccggggaatatcaaggggcaatgacataatcatctcgtaccgcacggcctgaaagttcaaaccctccacaatcaccttggacccgatgagaatacgcagctggtggccttccaggttggacgaggcgttaaaaagagccaggcttcgttcgcgtacagcgggctctatttcgctgtgcagaatggtgaaccgtactggaataaactgatggtcgctatgtgtgtgctcatcgcgaatcgcggcgcagatggagcagcgggtcgttcccacaggggacgaaacttcatttaaaatgccattactttgtaaaatttcttgcaagataagaacccccgacatgcggacccgattgtggtaaattaaaattttcccccggccttgccgaataatggaaagaatgtctttcatcatttgagtgtattttccgctataaaaggccaatcccgagatgtgcgttggtggctgcagcgacaaaaagctgccactcacattaaagggggctctacgcgaaggctcaataatctgtaccccgttttccagaagccagtctgtgcttgccatagaaagggcggtgggggtttccgtcgagttaaacaggccgtaagccttgggttccgtttgttttgaaaattttgggttgggaaacaccatgtcataaatgctgtacgcattactcgagattttagggtcagggcccagctgtttaagcgtttcaagctgatactcagacatggggcattcgatgaaatgtaagtacggcaatgtttcgtctttataggacaacatctttccggcaaatattctttcggggtaaaaattggtgttggtatccaacaaaaaagatacccttccggtgctcagtctttccacaagagctagggcgtcctttttccatttaacggaatgcccactgctgtcaaacagttgctggcgctggaggggctggccgttgggcagctcatgccgcggaaccaaaaggtttaacaggtcgacgtattccatgacactcccggttacgggcgttgccgacatgaagacggccctgggggcctggtgaggtggaaaggcatccaggacatactgtaaagcgatgccataattatttcgttcctggatattgtacacgttgtgtatttcatccgcaatgagcagtcctcccctaagttgctccatgattttttgattcacccggatgaggccgtttgtctcggcctcgctaattttttgcacgaactgagatatatcgttctcattcaatgtatcttctgcttcgtcagaacgatgaaacagagaaagcacatcaaagtttttctcttcacccttactcgtaatattgaaaagcttggatgcaaattccttatagccgtaaaactgaaaaaagcctccgcggtttctatcggttaaacggcgctttaacgtactaacgaacccatttagatgccgtgattcgaccgacgtggtgctgccagactgctttgcaatgtgaagaagccggtgtagctcagcgacctccttgtaagaaacaaatcccagctcaggacgtcttagcatttctgtttgaatgatggcgcgtgtaaagcctaccacaaaaatccagggcgcattttcaataaaattcatgtagtggttcataaattgacgcgcgatggcaatcgcggcaatgctttttcccgtcccggtctgccagtttaataaaagacgcgagtagggcgtgttgggattttgaaagttttggacgaaaagctgggcattatgcaattggagacccttgatggaaggaaagggcgacgcgtaggggtcacacggaaaaaacgctcgcccccccttctcgcagccaggcccaccgatctggacaaaatgagcccgcagatcacgaatgagctctttttggtcgacaggaggggaaatcaacgatttaaactcctttcttcgcgccaactgctgcaaaaagtctgcggcatccaattcgggatacgccatattatcataaaaaaaataaacctttttatgaaaacttttatgtgattctgtattgcaattgttttttatgaatactgtaaataagcgtatcaacttgtttttctaacgaagaggcgttattctttttttctggatataaaataataataagtataataattaagactaaacagcaggcaatcactatcaaactcatattatacttacttttttataaaaagtattatatcttatgaatgcgcaagttcagctaattgttcgtcgcttggaatgtgggactgcagggaggtggagtttttcctttttctaaagaataccgggaaatggtggtgaggctcaggttgttgtacatagtagctaggaggaggtttaggtatgctcgacttgcagtcaatagtccggttatagtaaacgatggcaacgatgataagaataataatgagcaaaatcaaaatgcccaggagaatcgcagttgttccgggatatttggcgattgtatgggctaaaaggccttgggtgctttgtttaattccctcgcgggttgacaggttatgagaaagcagtggagacgtttcagtgtccatttattacaattgaacagttatattaatctcaaataaaatataacacaaaattaattatggccatgcaaaagttatttacgtatatttacgagtttattgaatatcgtaagatggtgctgttggaagaaaaggtaccatatgataagtttgttcaaatggtacttaatacaggattttttcgtattaacgcggagacgctgaatcacggaatcgtatccgtgtttatctttggagcaaatggcaagtacgttcaccacggaggcgacatgagaacgcttttaacgaatacgcttaatgaaaaaaaacattatgaagaattaattttaatcgttgataagcccgttttaagcaaaaaaaatattttagatataatcgtcgagcagcgcgctgcaaatcccacgattgtaataaacatatatccctaccacctgttctgcattaacattcccaaggtgagtgccattcctaaacataaactaattactcaggaggaggcgcaggagtttttaggtcgcgaatatctgcaaccgcaggacctcatgcaaattagcgcgtcagaccccccggtggtctggctgggaggaagaccgggagactttgtgcaaattgagcggccctcagagacagctatgcacgctgttgttatccgctttatcaccaagtccaaaatttgagtcccgtgtttaaagatgacagacagctaagtaagcatatctgtaaaattgtcgatgtcctctgtggatagagcgctttcctctgagcagcaaattttttcatacatctccatgggggatggcgaggctttaatagtatgtaggtcacgtaagaactgttgtatgatgggatatttgtcttttaaaaactggggatgtttcataactggaattatttgaaagataaagaccttccatccaaagtagccaaccacatttggcatttcgggacacgcggtttcataaggcatagaatagtgaatagtgtactgatctttttgatacagcgtttcaagtagttggcgaaatgtttccgcgtcgagcgtgccaaaatcttgaggagcctcggtgtgctcctgtgtagagcagatcgtgatgattccccaggcaagcgggagcatggactctggagggtggatatccgtattggtctcattattcgatcccagctgatgaatgccgcacacgcgaaacatggcctcgacgtagatgcccatagagataggcggcgaaagggcaagaccggattgtatttgcggcatatagtaggagggcaccgagttttttatttttcggttgaatggggactttatttctaccagcacggggatgcgtttcgtggcctcatagcgtacgttgttaaaaattgttttgatttcccaggactgttgagtgtatcccagcgttaggtgacaaaacccatcggggctattactatgtccggggtatcccaaataggtcccatcaatatgaatattgtcacctatgacggtggtttggcagaacaactcaagcagatctttactaacacgctcaaaaagggttccccagctacaagcagcgcggttcaaattcttcttaaaaagatttgctttttccgccaaggttatataatagcttttgtaagggtttaaacctaaaacgctggcaaggtcagagccacccacctgagtgcgacgaatagcatgccaggcatcggagcgctgctgaggagagtctttaaacaggcgtacaaaggtttccattatacttgttttaacaggaattcaatataaaaagtcaacacagtttgcaatttttccaatctcaagatatagccatacatttttttttccaattggcgaatatgtttaagctcatgtgtttcaatattagcatccggaaatttaaatgcataaagatgttcaaaggcctgatttatacacgtatcaaaggatctgtggtatgttattagcttcagcatgtgtgccagatcttcaagatggtctaaatttatacggttttccacgtggtggatcatgtctgccacatcttgagcccccatccaggggatcacaaggtactcccccttaaagatgattcgtcgtttttttaaaaaatcatgaaaacgttttaaagcttcaagaaaggggcagttgggctttgaccccaaaatgctgacgacgatatcctcgggcatgatgtattcgcagtgaggatagtagtttacggactctaattcagcggcccgccgttttatttcgtatcttgcccagttattcagagagtactccacgcctccgaccacaacagacatcctatctattaaaaaataacaataaaaaccttatgaaatctatgtatagtggccgctaaaatgtctatattagaaaaaattacgtcaagtccctctgaatgcgcagagcatcttacaaacaaagatagctgtttaagtaaaaaaatacaaaaagagctcacctcttttttggaaaaaaaagagacactcggttgcgattcggagtcctgcgtaattacccaccccgccgtgaaggcctatgcgcaacaaaagggactggacctctccaaagaactggagactcggtttaaagcgccaggacccagaaacaacacgggtcttcttacaaacttcaatattgatgaaacgctgcagaggtgggccataaaatacaccaagtttttcaactgtcctttttccatgatggactttgagagggtccattataaatttaatcaagtggatatggtaaaggtatataagggagaagagctacaatatgtagaaggcaaagtggtcaagcgtccttgtaacaccttcggatgcgttttaaacacggacttttcaacgggcactggaaaacactgggtagccatctttgtggatatgcggggcgactgctggagcatcgaatattttaattcgacgggaaattctcctccaggtcccgttattcgttggatggaacgggtcaaacagcagctattaaaaatacaccacaccgtgaaaacgcttgcagttaccaacattcgtcaccaacggtcgcagaccgagtgcggcccctacagcctgttttacatcagggcacgcctcgacaacgtgtcatacgcccattttatatccgctaggattaccgacgaagacatgtataagtttagaacccatctgtttcgcatcgcataaactaataaagtttgaattctttataggaataaaaatggaagcgtttgaaatcagcgatttcaaagagcatgcgaagaaaaaaagcatgtgggctggcgccctcaacaaagtcactatttcgggtcttatgggggtctttaccgaagatgaggaccttatggcgttacccattcacagagaccactgccccgctttgttaaaaatttttgacgagatcatcgtaaatgccacggatcatgaaagagcttgccataacaaaacaaaaaaggtaacttacattaaaatttcgtttgataaaggtgtgttttcttgcgaaaacgatggcccgggaatccccattgcaaagcatgagcaagccagtcttatcgccaagcgcgatgtgtatgttcccgaggtggcttcatgtcactttttagccggaacgaacatcaataaggccaaggactgtatcaaggggggaaccaacggcgtcgggctgaagctcgccatggtgcattcgcagtgggccattcttaccaccgccgacggcgcgcaaaagtatgttcaacatatcaaccaacgcctagatatcattgagcctcctaccattacaccctccagggaaatgtttacacgtatcgagctcatgcccgtataccaggaactagggtacgcggagcctctgtctgaaacagagcaggcggatctttccgcctggatttaccttcgcgcctgccaatgcgcggcctacgtgggaaaaggcaccaccatttattacaatgataagccttgccgcacgggctctgtgatggcgctagccaaaatgtacaccctgttgagcgcgcctaatagcacgatacatacggcgaccattaaggccgacgcaaagccctatagcctgcaccccctgcaggttgcggcggtcgtgtcccccaagtttaaaaaatttgaacacgtgtccgttatcaacggggtaaattgcgtaaaaggagaacatgtcacctttttgaaaaagactattaatgaaatggtcgttaaaaaatttcaacaaacgattaaagataaaaaccgcaaaacaacattacgagacagctgttcaaacatctttatcgttatagtgggttccattccaggaatagaatggaccggccagcggaaggatgaacttagcatcgcggaaaatgtttttaaaacgcattactccattccttctagttttttaacaagtatgacaaagtctatcgtggatattcttctgcaatccatttctaaaaaagataaccataaacaggtcgacgtagacaaatatacgcgtgcccgcaatgcgggaggaaaaagggcgcaggactgcatgctactcgcggcggaaggggatagcgcactttccctgctgcgcacgggactaaccctgggaaagtccaacccaagcgggccctcctttgacttctgcggcatgatctccctgggaggagtcatcatgaatgcctgcaaaaaggtgacaaacattacaacggactctggagaaaccattatggtgcgcaacgaacagcttaccaataataaagtgttgcagggaatcgtgcaggtattgggtctagacttcaactgccattacaaaacacaggaagagcgagcaaagctgagatacggctgcattgttgcgtgcgttgatcaagatctggatgggtgtggaaaaatccttggactgctgctggcctactttcacctgttttggcctcagcttattatccatggtttcgtaaaacgactgcttaccccgctgatacgtgtgtatgaaaagggtaagaccatgcccgtggaattttactatgaacaagagtttgatgcctgggcaaaaaagcagaccagcttagccaaccataccgtaaaatattacaagggattggcggcgcatgacacccatgaagtaaaaagcatgttcaaacattttgacaacatggtgtacacgtttaccctggatgactcagcaaaggagttgtttcatatttattttggcggggagtcggagttgcgaaaaagagagctttgcaccggcgtggtgccgctcaccgaaacccagacgcagtccattcatagtgtccgacgaattccttgcagcctgcatctgcaagtagataccaaggcttacaagctggatgccatcgagcggcagattcccaacttcttagacgggatgacgcgggcgcggcgcaaaattttagccgggggggtgaaatgcttcgcctccaacaaccgtgaacgaaaggtttttcagttcgggggctacgttgcagatcacatgttttatcaccatggcgacatgtcgttaaacacaagtattataaaagccgcccagtattacccaggctcctcccacctctatccggtattcataggcataggaagttttggctccaggcacctgggaggaaaggatgcaggatccccaagatacatcagtgtgcagcttgcgtctgaatttattaaaacaatgttccccgcggaggactcatggcttctcccctacgtctttgaggacggccagcgggcggaaccagagtactacgtgcctgtgttgccgcttgctattatggagtacggcgccaacccatcggagggctggaagtacaccacttgggcccggcaactggaagacattttggccttggtgagggcctacgtcgacaaagacaacccaaaacacgagctactgcactatgcaataaaacataagattactatactcccgctgcggccctccaattacaatttcaagggccatttgaagcggtttggccaatactactacagctacggcacgtacgtcatctcagagcagcgaaatataattactattacggagcttcctctgcgtgttcctacggttgcatacatcgaaagtataaaaaaatcgagtaaccgcatgacatttattgaagaaatcatcgactacagtagttcagaaactattgaaattctggtgaaattaaagccaaatagtcttaaccgtatcgtggaagaatttaaggagactgaagagcaagattccatagaaaattttctgcgcctgcgcaattgtttacattcacatctaaactttgtaaaacctaaaggtggcattatcgagtttaacacgtattatgaaattttgtatgcgtggctaccttacaggcgtgagctttaccaaaagcgtcttatgcgtgagcacgcggtgcttaagctgcgcattatcatggaaactgctattgtacgctacatcaatgagtctgcagagctaaatctttcccattatgaggatgaaaaggaggcaagccgcattctaagcgagcatggatttcccccgctgaaccacacgctgatcatttcccctgagtttgcctctatagaggaactcaatcaaaaagcactgcagggctgttatacctatatactatctttgcaggctcgagaattgcttatcgcagccaaaactcgtcgggtggaaaaaataaaaaaaatgcaagctcgtcttgataaggttgagcagcttttgcaagagtctccctttcccggcgccagcgtatggctggaggaaattgatgcggtggaaaaggctattataaaaggaagaaatactcagtggaaatttcattaaacgctaccggttttatgatgtccaataggtgttaagcaatcagttcatcaacatttttttcaagaatttgaaaagtttggataatgttctgaatacttttttctaaaagagttatcaaatcttcttgtgaggccttatgaataattgttaataccatttcttgcttatggggaacacactgataccccacaaagctaatatcaggaatcatttcataaatatatgtttttagcagatttccgatggtatgggtttcatcttttatcgtgataatggcctttgttttttcctcatccatggaaaacagcacaagttccggctgcggctcttcaaagttttcataaattttttgaatgctttggattcggccaataatgatccggcaggcgttttttaaatacgtgcgaacggcctggttgatatgtggcagcggcaccgctggaaagcaaagccccaggcggtggtgacgcgggtctgaggtcatagagctttgcttgtaaccgctaagcgccatatattcttttttatccgttgggtactgttcaatgtcaaggtgggaaaaatgtgttttaacggcaagattaaaggcggcatgctttcgtcctatgccctttttaatatagatatcctctataatcaacgattttccgggttgtaggaagccaatctcaaaggtaggattaaaaatcgggtatttaagcttagggcctgccacctggatgagatcgcggctatagatggttttaacctcacagctattgtttaaactccgcagagcaaataccagtgtctcgtttttcgcataaatcggaatgaaattaatgcggtttctaataaattgttccgtcataaacaggtccgtggaatcctcgatcttatacccaccgggcttaatatctagcatataattgggaatttcatcttgcaagacccgcgacaggccgtggaccgcggctctgctaatgcccttaaagtccataacaacattgaccgggacgaggggcaactgctcctcgagctgaaatagttttttggccgcatttttaataaagaggttggaaaagtctatcaaaaacggtttgatttccacgttttggaaaattttttccatttgtattataaatatatctatatatattcaaattatggtagtttatgacttgctcgtttctttaagtaaggaatccatagatgtgctacggtttgtagaggcaaaccttgcggcgtttaaccagcagtatatttttttcaatatccaaagaaaaaactcgatcacgacaccccttctcattacgccgcagcaggaaaaaatttcgcaaattgttgagtttttaatggatgaatataataagaacaatagaaggccctccgggccgccgcgtgagcagcccatgcacccattattgccgtatcaacaatcctcggacgaacagcccatgatgccgtatcaacagcccccggggaatgatgatcagccatatgagcaaatataccataaaaaacacgcgtcgcagcaagtaaatactgaactgaacgattattatcaacatattcttgcattaggcgatgaagacaaaggtatggacagcatgttaaaacttccagaaaaggcaaaaagggatagcgatgatgaggacgacatgttttctataaaaaactaacgacgtaacaattaaacaaaaaataaaaatcattataaaatgaatcttgaatacgtccaagttgttcaaaaatttaatcaagtactcctagaacttaccaaaaaagtatgtaccgttgtgggcgggagcaaacccacctattggtatcaccacattagaagggtttgctcagaatgtccatccatgccgatgagtatgataggtccgtatctgaatgtctataaagcccaaattctaacaagggacaagaatttttttatgaatttcgatcccgcgcataatgagtacacctttatcattcaaaaactaaaagaagcagcccgaaatatgccggaagacgaattagaacagtactgggtaaaacttttatttttacttaaaagctacataaaatgtaagccctttattaattaaagaattgatgcataactaataaatggccggtcgtgttaaaataaaacagaaagagctcatagactctactgtaaaaaacaaaaatgtgatgaatctgttccatgaaattataggctcaaaaggcaatattaattttagcgttgtctggcccaagtttaaaaaaatcaaacagagcgtttatgactacatttccactctttctgtgctggaaaaagcaaacgttatgcaaaactttgaagctgataagaaactgttggaactttttgtacaaaagctgtgggctgcctatgaaggctatttcaaatatcccgagattgaaaaatatgaggtggaaggccaggtaaatttcaatctcgtacctcagtgcgtcctcgaaaagtttagccagttgtataggataagaatcaattcagagcttgtcacactcatcctaaacagctgtgcctttatgagtaaatataacgattatattctcaaaaaagatccctacatactaaccataacccccggcctatgcttttcccccattcccaacttcgaggacctaaattttaaacatctttacaacagtgataaaaattctcagcatgacaaagagtttatcatgtttatattatataagctttatacggctgccctaggagtgtacaatgccatctcgattccagacatcgacgtagaagaccttgaaaatatcatcctatcctcggtgagccagattaaaaaacaaattccgcgctgcaaagacgccttcaacaaaattgaatcttcggtacacctgttgcgcaaaaattttaacacatattacagtgactatgtgggctcaggctacaacccaaccatcattatggaacagtacattaaagacatatcacaggattccaagaacatatcaccacgcatttcctaccagtttagaaccatcatcaagtattaccgcgacatgattgccaccaggcatcaaacgatggacccccaggtattaaacctcgtaaagcacgtcgaaaagaaattagatatgcttgatagagaaaaaaattagtatatatagttatggtgaatctttttcctgtttttaccttaattgtgattattacaattttaattacgactcgagaactatccaccacgatgcttattgtttctcttgtaacagattatattattattaatacacagtatacggaacagcagcatgaaaacaatacatttttcatgccgcaaaaaaattcttttaacgaatcttataataaagacaaaaaatctaatatacatattccctaccagtggctggcgcctgaactgaaggaagctgagagcaagtactggtggggcaattatgatcctcatagcgagcccgttctcgctggcgcatcttgaatatcttcatacgtggcacgtcaccatcaaaaacattgcccaacagcacgggcttgatataaaggtggccattgtggtctcaacatcgcatttaaataattttttgccaatttccggggcgcttaacatcgaatgtataaccttccccagttgcggcatcaaggagatagacctcctatgggcgcgcattaaactatttcaacattactgcgccatcggtgcccgtcttttatggctggtaagtgctgacatcaggccccctgtttcagcgtggccagccatcgccgacagtctaaaaaagggagcagatgcggtcgttattccctacccctcccgatggaacaatcttatacctaccgtcatcaaagaaatagttgtccaccaaaaaaaatgccttgtggcggtggatgcacgccaccttgatacagatacccagattgtaggggccgggatgggctgcatcgtcctaaccctaaaggcccttatggtgcgcctaagtattggcaaacagcccgttaagatactgtggcccgaccttcacggcactgccgagggcattcctctggagggggtggaggttggctggtttttaaacgcttatgcgcataaattaaatatacgctgcctaggggctgatcatattgcgcagcacttaacttaattctttatttaaaaagtccacgcatccagtggcggcctacattaagggcctacgcacataaatatacactggctagaagtacgccttcatttaaaccattgaattatttatataatggctgcaaacattattgcaacaagagccgtgccaaagatggccagcaaaaaagagcatcaatactgtctgctagactcccaggaaaagcgtcatgggcattatcccttttcatttgaattaaagccttatgggcaaacaggcgcaaatatcataggagtacagggctcacttacccatgttatcaaaatgacagtatttccatttatgattccttttcctttacaaaaaactcatatagatgattttattggtggacgcatttatttattttttaaggaactggacatgcaagcagtttctgatgtaaatggaatgcaataccacttcgagttcaaggttgttcctgtaagccccaaccaagtagagcttcttcctgtgaataataaatataaatttacatatgctataccggtagtgcaataccttaccccaatcttttatgatctttcgggaccgctagatttcccattagatactctttcggtccatgtggatatcctctccaatcatatacagcttcctatccaaaaccataacctaacaacgggtgatcgtgtttttatttctggatataaacacctgcaaacgattgaattatgtaaaaataacaagatttttatcaaaaatataccgccgctttcatccgaaaaaataaaactatatatactaaaaaatcgaatcagaattccgctatactttaaatctttaaaaacgtctaagtaataacatttttatagtctactcctagttccgaaataggctgaatttcttttttaagtcctttaaaccaaggatgtgatacaagactcttaaaggaaagccgcttattttcattaattgttaaacattccgtgataaactgttttcccgtctctgaaatgttctcgggaatataattttcccgtttcaggatatcatttaaataaaaattttctgcacgaaatctaaaaagattaaccgcgaccatacctatcgtccacacggttaaaggaagctggtagtaataaccataataataaaattctggacacacgtattcccatgttccaaacatattatattggggacgggtttcgtctaatctaacagcgcttccaaagtcaatgaccttaatgatcttttgatttatgtctataataaggttctcatccttaatatccccatggataaagcccttctcataaatgttttgtataataagaataagctggaatattatttttttggcttcggtttcctcaagttttttaaagtaatgataatgaagtagatcaacactatttggaatatattctatgattagtatatgatacatagcattttcggtatattcgataagcttaataacaccgggagtatcttgcagggctttcaacacgatgacttcatttcctggaatttcttttttagaaacgtacttaaatataatgggttgccctacttgatgacccaaaaagacgttatttctgccaccctcaaacatgggtctcgtcgcaatgaaatacatgtgctgcgttgtggagatcctttccacctttgctgtaggataaaacgcatattgtgcctggggattttttaacatttttttaagctgttgttccggcctggacatgttttattagctttatatataaagggttagaaggtttaatttcaatatatgccttaatgatgggattatattcgtaaaaggtatagcctaatcctacgtctttgtttttttggtaaaaaaactgtttgccctcgtaggatatgctataggcttttacttcggcttttacaagcggttggcagggattgggcaaacgtaaatcgcgttcaaagttttcatgaaaaagcaaagcatttgtgggctgacacatcagacagccgctttcgccattgaaggcacattcaatggccgccctttttagtaaatcgcggaaagcagaattaagatggctcttttcaagccccctttcgtgaaaacgctcatcaatcgttttttgttcctgactgccttcgggaatactataaaacattttttgattagccaccgcgatgtacaaaaaaggctgtacggttttctcctcgggcggtagcgcatcgtggctaccaatgcgtataatgcgcgccttcacttgatcctctcgggccttatcccagtacggctctaggatatgaacctgccgcccgtatttgagatccaatccctcagctcctgttttagagacgagtaaaattttaataacctctccgtgtatattcagcggcgaattccaaagctgctggatcatgtcgcgctctttagataaaattttccctgtaataagcgtaaatcgtgttattttggaggacaggactaacgtatgggtcggcccatcttccgcaaagtttttcaccataagatctttcccatccttatgaaggaggatggtgttgtgcccttcttccaatacttttaggggctgaaggcactggtagccctctatttctaaaaagcgggccacgacgtgaaggcccaattccacaaactgtgagtaaatgagcacagggcccggagacgttttaatattttttagcatgcgtactattttgggactagaattttctgtgaaggcctctttgggcagctgctgaacagcctctgataatttttcatcctcctttactgttagcatttcggacgcgaagatgctgatcatacgggaacgcacatagtaggaggagcctgactcttgctccgatcctggcaggcagagggcggcggcatttattttttcatacattcctgagctggcgtgcttttccgcgttttcaacgtctcgggccagcagatattgcctatactgctcgggtgacatttcaaccttttctataataagaggaagctctgtggggaatagcttgttgagctcattctggtttccagcgtagcttatcatacccactaggcggtttagtagtttgtccgcgtttaaagggctattcgttgttttattgacataagcggtgtagaatctttcatagtgaagaggtaataagattcgcccgcttagcatattaaaacagggcaccatttcaaaggggtccttcgaacacggggtgcctgttaaaaacagaatacgaatatttttagcttgcataatattattgtacagctggcgggcatttgttttatcattggcgctattgataattcctctaaagaggttgtgtgcctcgtcaacgatgagcaggcatccatttagggaccctcccgcctttatgatctgctgccccatgttgtaagcgtctagggacacaaacctgaagcgccgcgagattttttgtagctctttggagtgatccgtcgtttccggatataaaagtttaataagctttaacaaagactgttggaagtttgagtgcaacgacttgggtgcgatcagaatcgggttgtaaatatgtgaaagtgagatggcaagcgacaggctcaaaatggttttccccatgcccatctggtgatagatgaggaggccccgtgtgttttccccctggcctatcccaaatttaggatccgaaaaggcggtgtaaattaaaaactggtagtatttcagggctcgtgcaaagcgggcagtgagtgaggtgtctttgctttcctgaagctctttatatttttcatatacctcttttaggtatgcttctatttggacggggaaggaggtgttgttgtgcacgcaagacatgactcgttataaggatcccatattaaaacttcattagaagaatagggctgctgatagctagcgctgcacttaaaaatggggtagccctttttcttgtaaatccggtgcctgtcgtagacctggctagaaagcgggcttagtgtatctttaatgtccacaacgatgcgtacctttttttcatccgatccctgccgggtaatacgtcccaagatttgctccatgttgtttctgcggggcgttgccatgatgatcgatgtcatatgcttgaaggaaatgcctctacgcccgtagccataggtcagcaagataatggaagcgctgtgtgcctgagaaagagcggtatttgaaaccccgccgcataggagcgccacctccggaacgataatttgaacatctttgaattctttggaaagcgcctgataaaaaatttctaaaagtttgcgaaattccacgaaaatgatgatgccatacggctcatcggtcccccatttgtgaggctcagcggtatgcagggagtaaagccgctttgcctcatttacgacaagttgtatacgcgaaggatcttgaagtagtttatcaatggtggcaatggccgataccttttcattaatatacacagggctaacgaagtcaggatgtccctgatattcgatttccctcacgtacccggaaaaggttgtggtgggacttacagtcctctggggctgtcctagatggtgaataataatcttgtccataccatcgggccggtccaggggtgtagcggacagtcctaatatccgactaagttgtattttccaaaaaattttgtaattctccggcgagtgtaattcatgtgcctcatctaacacgactagaccaaagggctcaaagaactgctcaggcttcttgcgcagggtattaatgattcccacgatgacgtcgtactctttgctcgtcatgtcctttttcttgcacgctgcattattgtaagcagctacacgtaggtggggcaggagcaatgttagctcgtcgatccactgtatttgaatcgccttggtgggcacgatgaccagggtagggtacaaaagtttttgaataatgctgatcgcaatacgcgttttccccaaaccggtatttagatgtaggtaaaagcgcccatagggggacaggagctttttatgaatcttatcgaccatttcttgctggtagttaaatagtggaaattctgtttcaacgcatgggagggcccgcagcgacacggggcgcgtcgtgtaaaccatgttaaacatttcaaactgcttttgcagcaatatgggaaaataaatgtattccccctgcagcgtgaaggcagtttcctgtcttatggctatgtgctttggctgcccgggtaatgcccgcgccgtaacggtgagcgccttaagaacgcgcccgaaatcatgttgtaatttactttgtagcttcttataatttattcctattccagcaaaggatataatggcctccattctcacgctggacgggttatatgcagaggttccaaaattcttaccagaggcgttacgagagggctgtgctggcaagaatcctctaagcttttatattcaacaaattttaaatttaatgggatgtgacggtaacgagtaccatgttctttttaccagcagctccgaggaagcaaatactcatatgatcatggccgccgtgcgtcgccatttgctgcggacgcagcaaaggcctcatgtcattatcggagcagccgagccccctagcgtcaccgaatgtgtgaaggcattggcgcaggaaaaacgctgcgtatacaccatcatccccctaaaaaattttgaaatagatcctgttgcggtatacgatgccatacaaagcaatacctgcttagcgtgcatttcaggcactaatgctgttgtcaaaacgttcaacaaactccaggacatcagcaacgtgttaaaaggtattcccctgcactcagaagtgagtgatcttgtttatcaaggatgtattcaacaaaatccgcccgctgatagtttttcaataaatagtctctacggcttcctgggagtcggtgttttgggaatgaagaaaaaggtcatgcaaggattggggccgctcatttttggaggagggctgagaggcggaagccctaatatacccggaattcatgccatgtataaaacgctaacccagcaaaggccttctatgaaaaaaataaatacaatacatacgctgttcatgaaaactttaaaaaaacatcagcatgtatatctacccatagggggcgtgtctgcagaggacacgtctgcagaaaacatatctacaaaagacatgcctgttgaaggcccgaagggactcccgggctatattttatttagcgttggccgtcgcgccgaggagctacaaaaaaaaattttcactaaatttaatataaaggttggccgtgttgttgacttacaagagatactgtttcgtatcaaaataccccaaaaatactgggagacattattgttcatccaattaagagataatttgaccaaagaggacataaaaagagttatggttgttttgatgcatttagataccatcactcctcgtggctctcttcctcctccgagccactcttcttctttttcttaatcgtttttgtttgttctataataagggaaaagaactccgtgggatcttgttccccgtacaggttatctgcgaccataaggatgcttagaatggtaaacaggtgagaatacataagggtttgcgttttaagaaaaccctgacgttgaatcataattgaaaacaccttgcaaagccgactcatcagttgttctgtaatggcgttaagcattttctggaatttttcttggttttcgggtgtgattttatattcatgtagaaagtgtttcacacctgaggagaagaatctttcctccttcgagagcccatctttgatgatgggaagttccttgatcagggcaaaccattcctcctcttgggcttgcggattctgaagatactgatggcagatatggtttagaatggtgcacacgtagctaataagctctgagctgattctttggttggttttcaaatgttggcgaaagtagtttttcaccgaagtgcatgtaataaacgtcttcattttcttataatatacaacagtatgttgagtctttaatttaaaattacaaggagttttctaggtctttatgcgtataggtgtttctttgtcgtaaattttcaatagccgacattgtttgtgaagcagtgttctgagtagtgactgtcgtgtaaggctcagccggatgagcaggagcactcgcggccgcaggtgcggccgccggcccgccagttgccatgactagtctgtccgtaactgggttgtccgtaactggtttgtttgttgctggtctgtttgttgccggtctgcccgtgactggcttgcctacacttgctgtagtcgctccagctggtttagaggtacctggttgtggagtgacttctacccactgctgatcttgataaggatttataaactgtatatcttcctcctcaatagcagcagcttttttctttcttgaagagaatagatagattagaacgatgataatgatgactaagaccacgatagcaatgagaatagtatacatatgtgtggagaagaagcttggtgtagtgactggtgacaaacactcaccataatgccgcggataaaccggttgaaaaaattcagaatccatttaagatactattataaataatatataaaaatgttgtggcgcaatgaaattacagaatttatggaccaactttccaagtattctcaagaaatcttaaaaacgtttaagcaattgcgtcctagtgaatataaacaatacaatgaatttttaacacaagttacaccgttgctgcaaaaaacccctgaaaaaattccagagttggttgaccatatattcaattacctagacaacgttgaaaaaatttgtgagctcctcgtgaatgctagctcaattattattagttcaaaaatacgagaacaagtaaaacacggaatgagcttcagctataaagccgacctcgactccttggcggacattctctctcaaaaacagtacgtgcttatgcatctttcaaaaaatattgcggccgagtattttaatacgtgtttaaaccaagggaaatccaagttagatctcaaagctgcctctgtattttatagtagtcgttcccgaacggcaagctcagcagaactctatagaaaaatgctatacgcctatggttcaccgcaggaaattaattattatactgaaaaagcccgaaataagacgttggatgtggaggagagcgacagcatggccatcatcgaacgaacggcccgacacaacctttcccttatgcacccgctagaagccatggggcttacctttggggcaaccaacacggacgccgacccggaggatctgaaggacaaaacggtgataaatttaacgctcccgcaggcaacagaaagcatcacctaccatcttaaatccctaatgcagctaaaaaaagtaagtacggcttcaggactaaatacaaacattttgaaagcatttgataatattatttccacccctgtgaaaaaaaataaaatggcctccaagttggcgcccgggatggatgtcgtgttcactagcgataacggaaaaacattttttactaaaaacattttaagcaaaaacatgctagcggggcccaaagagcgggtgtttgcatataataatctcattagtaatttaaataactcctgtttcatacaaaatcacaacgattttttaagacagcaggactcttggcccttctatgacgcgcacaattttaccaacaagtttttaatgcagcctattttttcggggcagacccgtcctcggcttcagggagccatggaggcggcgcatgtggaaacgcatctcacggcatttttacaaagtattcagccctctaggccacaagatccctctgttttggcttcccccaagttatctgctctaatcttgaactaaaaacagcctttcttggacttaaatgatggtctaccagtttttgaaataacttagagaactatgaagattttcatgaaatttaaattagagatttgcaaaggttacttgcggtcattttctgttgaattaaataattattcgaatagtataatgtctgaagatattcgtcgtggtcctggcagaccgccaaagaaaagggttgttcccaactttgagcgcaagggcattctggaaaaaccagttcggccacaaagccgtctcgagttttcctatgataacccgctgatatttaaaaatctttttatttactttaaaaaccttaaaagtaaaaatattttggtgcgatgtacccccaccgagattacctttttttcacgtgaccagtcgcaggcaagctttgttattgccaccatcgacggaaaaaacgtgaaccattattacgccagtgatgtcttttggctaggcatcaacagagagctcgttgaaaaaatgtttaacagcattgatcgctcttttttaaaaattaccatcgttcaccgctatgacaagcctgaaaccctgttttttatctttacggattttgacattgacaaggagtgcacgtatcagattacggtctcggagcccgagctcgatatggaccttatcgaaatggaaaaaagcatcagtgaagaaagactcaagaactatcctctgcgctgggagtttacctccaagcagctcaagaaaacatttagcgacttatcaaactacaccgagctcgtgaccattgaaaaactcggcggcgatacgccgctgcacctgtatttccaaaagtttaactccatctcataccacgagatgtataaatcttccaacaagatcaacctgacctcgaccattcctaagtcgcaggtgttccagataaatgttaaaattgctcacatcaagtcgctggcctcggctatggtcaccgacaagatccgcattctgtgcgaagaaaatgggaacctaatctttcaatcggaaatggatgcccttatgttaaatacgattaccttgaacaccacgatatagttcggtaacattagatgttctaatatttagcatctaaataatacgctgtagtccggtcagggttgcgtcacagttttcccatttttttgcctcgtcggcggtggccaccgttgccctatcatttacgcccggtaagacaaagctaaaggcgttcagcggggcttggcaatgcccgcccagcgtgaaggagctcggaggattttgcgcatcccgaaatcccttagccatgttgtttaacacttcggttacgtcaatcgagtgaagggatcccttgggatccgtgaatgtaaagacgcagtttctaaagcgcatgtatgcgatggacgattcatcgggggttttgaaggtaacagtgttccccttgctgtacttaaagggggaccatccggtaaaattataccaaatgaaagcaataataattaaaataaccaacacaatagttatagacaacacaaagtctgtagtgccgcccattattaaataaaaatattttagaccgccggcttaaaatttacttattgctcatagcttaagtctattttattcatagcttaagtttattgctcatggcttaagtctattgcttatagcttaagtctattttattcatagcttaagtctattgttcatggcttaagtttgttgctcatagcttaactccattactgatagcttactgatcatgacttaaataaaaatattttgcccgcttaaaaattgtttaggtttgaaaaaataagagatggagggggcaacttatcgtcattgtgtttacccccactggaagacatcaaacggtaaataattataagaatcaaaatgattaatataagggttaaaaaaggatgattcatcacattaattaaaaacgtatttataacgctgttgcagttgaaattttggtataggtcggaaatattgcccgagcctccgtattctgcaatgttctgacatatggtgagtccggaggggcactgcttgttggtcaaaatatttctttgctccgttgttttataggcatttttatttccattacacggagcaaacgcacattcagcccatagggtgccggagttcacacaggcacaatactggctatacgcatactcatcctttgagcacaatccctgtttatcgcatatgctcccaataatattgtcatcctccgccgtttgttgatttgtatgcgagcgtaaaatagcggcccaggccttgggctcctttttttgcagctcggaaatcgaagggcctgtacagctaaagtcgacccaaatatcattgcatttcgtggaaactggcatgcaagacataattgaaataattaataagtatatatcatggcaacaaatttttttattcaacctatcaccgaagaagctgaagcatactacccaccttccgtgataacgaataaacggaaggacctgggggtagacgtatactgttgctccgacctagtgcttcaacctggactaaatattgttcgcctgcatattaaagtagcatgcgaacacatgggcaaaaaatgcggttttaaaatcatggcgagaagcagtatgtgcacccatgaacggctgctcatccttgcaaacggaattggtttaatagacccgggttatgtgggcgagctcatgctcaagatcattaatcttggcgacaccccggtccaaatatgggccaaagaatgtttggtgcagttggtggcccaaggtgaccatgtgcctgaccatatcaacatcctaaaaagaaaccaaatatttccgctgtttgcgcctaccccaagaggcgagggtagatttgggagcacgggcgaggccgggattatgagaacttaattttattttttttcttaacataatgggaggctctacaagcaaaaattcctttaaaaatacgaccaacattatcagcaattccattttcaatcagatgcaaagttgtatttccatgttggatggcaaaaattacataggcgtattcggtgatggaaatattttaaaccacgttttccaggatttaaacttatcattaaacacaagttgcgtgcaaaagcacgtaaacgaggaaaatttcattacaaatctttcgaaccaaattactcaaaatttaaaagaccaagaagttgcgttaacccaatggatggacgcaggaactcacgatcagaaaacggatatagaagaaaatataaaggtaaacttaacaaccacacttattcaaaactgcgtttcatccctgtcgggtatgaacgtgctggtggtgaaggggaatggcaacattgttgaaaacgcaactcagaagcagtcgcagcaaatcatctctaactgcttgcaggggagcaagcaggccatagacaccacaaccggcatcactaacacggtaaatcagtactcacactacacctcaaaaaacttttttgacttcattgcagacgcaatttcggctgtttttaaaaacatcatggtcgcggctgtagttatcgttctaatcatcgtagggtttatagccgtcttttactttttgcattcacggcaccgccatgaggaggaagaagaagctgaaccactcataagcaacaaggtattaaaaaatgctgccgtttcgtaataatttaattaaaagtaaaaaaaaaaggtattgttatagtgatggcagattttaattctccaatccagtatttgaaagaagattcgagggaccggacctctataggttctctagaatacgatgaaaatgccgacacgatgataccgagcttcgcagcaggcttggaagagtttgaacccattcccgactatgaccctaccacatcaacttccctgtattcacaattgacccacaacatggaaaaaatcgcagaggaagaggatagtaattttctacacgatactagggagtttacttcactggtccccgatgaggcagacaataaaccggaagatgacgaagaaagcggtgcaaaacctaaaaagaaaaaacatttgtttccaaaattaagctcgcataaatcgaagtaaaaattgaagcgaaaaaaagtagaaaaaaaatgtttggagcttttgtaagccaccgtttgtggtcagatagtggttgtacgaccacctgcatcacaaacagcattgctaattatgtagccttcggcgaacaaattggatttccctttaaatcagctcaggtatttattgccggccctagaaaggctgtgataaatattcaggaagatgataaagttgagcttttaaagatgattgttaagcacaatctttgggttgttgctcatggaacctacttagatgtgccctggtcccgtaagagtgcgtttgttacacattttatacaacaagaactacttatatgcaaggaagtcggtattaaagggttagttttacacctaggcgctgtggagcctgaacttattatggaaggactaaaaaaaattaagccggttgagggggttgtcatttacctggaaaccccgcataacaaacatcatacatataaatacagtacaattgagcagatcaaagaattgtttttacggatacgaaataccaggttgaaacagattggtttatgcattgatacggctcacatctggtcttccggtgtcaacatctccagctataatgacgcggggcaatggctgcgctcgctggaaaacattcattccgtgatcccaccaagccacattatgttccacctaaatgatgccgccacagaatgcggaagcggtatagaccgacatgcaagtctttttgaaggaatgatttggaaatcatatagccataaaataaagcaaagcggtttatattgttttgttgaatacgttacgcgacaccagtgtccggctatattggagagaaacctcgggtcttccatgcaattacaaaccgctttaaccgcagaatttactacattaaaatcgttattaaaataaggatgagttttagcgaatgtcccttagttattagtgcatgcaaaaaatttctacaaaagcgtattacaatagagaatgaagcacttataaatgccttaataaccgctttagcgcagaccagcacgttgaatgatctttgtttattacctattcaaacctatttgcttagttataaaaatgcttttgagtggatacacttcgtatgtattgcaatcaccactattttggataataagtataactggaaggactgtacggtagatattaattatatttttctccatgtaacctatatttacaatattaaaaccaaggaatacctagactactgttcttaaactttattttttctatatttacgccaaagagaatatttaaagttttttttgaaaaaaaataatatatgtagataaaattcagttacatgatatatgtgtaaacatgtgtggtaaacaacatatggttatgctttataagataaatgcgcataatatatgtaaacaaaatatggttatgtgttaaatgcatataaatgtattttaacgtatatcttgtgataatggatatatgcatttattaaaagaggctgtatttattataaatcttgctaaggatgccattgtcaacatatatcccatgttggacaaattgcgttgcgatccagttcttttttttttgattttgtttaatgctatcctttttgaagggatggttgtccaccatatttattcgatgttcaatgaataggtctgctttttcgtaaggcagtgaaggtcgttccaagactccttgaacgaaggacgtgttttcttggatccacttaaaaagcacgtggcattcaaaaacaggacagtgattggatccttggatatgctttggacagccaatgcttgaagagatgtagtcccttttctttaggacaagcttctccacgctggggcaacagagatcgttcaagttctggacggtcgcatttggaatgttgaaacttcgtatccattcaccctcgggtcctcccttatgaagaaggagtatttgctcatggtccttagtaatcttaaccaaatgttggaagatcatttttttacctgctttaaaggcctgaagggtgtcagttggcaaagctattgaattcgggagtgggctttcatcaagcgtgaaatggtgaatgtgacgcgactggaaagaaaacgaccgttgatttattttttcaaagattgggtcgattccgccatgaaagaacagctgcaagattttagaaggcgtatttttttcccaataaaaaatgaccacttctcgtgggattaaaatcgtctgtgtcccattttcattatataattggcccataaagccatcaacgtcaatcaacaccaaaagcatggtatagagagcttttagaaccggagttcgttaaaaaaatacaaagttcgtttaaaacgtgtaatgttactaaaaaaatgtaatgtttaaatgataatgataccacatgcattaatgaaaaaaacttttaaatttttgttttaatatttgcatgaaaatggaaacatttttagtctgtttatttcacaatgcagatggtttacatcaacagattcaggaaattttgtatttattgcggatgcatatttacgaaacaaatctttacttaaagcaggaactatcacggcttatatatccaaataggcaactttcttttgtgttacttatgcccctttcccttctaagaaactgggatgacattgaatatttaacggacgttgtagatgataagcagactctacattacgcggcaaatttgctgacaaactacgttctacatctatccatgtttcaaaagctgacaaaaccatacttccttttagcggtcaagcgggtcagcgaaaaactcaacaaaaagcagcgacattcattttacgaggtattggtaacctccgaaaccttgaataattatgaaaacctatctaaaaacattttaaatacgttgatgtttgccgtgcgctacgtatttaaacctacgccgaactattcagaaattctcgcagagttggaaaaaaaaaataaaattcaccatattatttttaatatggtaattacggattttgcgcaaatccgtgaacaacaaatggataaacatctgtgtgaaacaaataatgagcttcgtcaggaatgtaaagaaactatttttgatttaaaggtggtaggaaatgtttagccaataaactcatgcccgcattttttacaggtacaaaatatcgtggatggctcatcgagggcgcgtgtttgtacttctctgtaggtacacatacgctgcttgcagttgggacacttataaagttgtgacgtcttttcggcgaccttttgctgcgaacgtagagtaatttctgtcttctcctttaaggcggcagaggggcaaagctcggcgaacgtcatgctaccaattgcctccggttttagctcgccagaaattagcttattaagggcatcgttatcctgttgttggtgactttttttttcgcagttaataatatgattgatcgtcccacaacgggttgaatattcttctaaaaaggttttttcttgttgctggtacgtataatgataacacgaggcctcgattttttgcgcgtattcggtgcataaatcagtatgttccttaaaaaacatatgtttttgaagcgttctaaaaaacatcatttggatgatatcacgcatttccaaaataatatagggttctagtcttttggaatctttcataactagatcggtggtaatattcttagtcatacaatttattaaaaatggtttaatatattgtaaatattttttaggcgtgtcagcctgtaaaaaacattcttgttcaatcttatttgtaaggatagtattttgcaaatacttatttagcaaaaatacgatagaatcgcgggctatatgcattttcatataattttttttttaaaatttaatacaaaaaaaagaagtatagactcttcttctagtccggttagttcgttggttgcctcaacatggagactcagaagttgatttccatggttaaggaagccttagaaaaatatcaataccctcttactgctaaaaatattaaagtagtgatacaaaaagagcacaatgtcgtcttacctacaggatctataaatagcatactgtacagtaactcagaactttttgagaagattgataagacaaataccatttatcccccgctttggatacggaaaaactaattgtaaccagtagtacatttaaggatagtttaagcagtaaatgtagaataacacagttaagcaataaataacaagtatataggaatatataggaatatataggaatatatagaaatatatagaaatagctaagcttaatactaattcagctttttttttaactaaaacctgaatagatgcgaagtagcggacatatacatactaaaataagccatacatttactttcttcttgaacatgaaacctttttttcttctgttgttggtatataaacaataggactgtttgctgaggttgtatgatcttctacaactgctgtctcaggatgacgatgtttttttaaactaaaagtgtaggatggaatgagtggaatatagttatggctcgacttatcctgtttcgtacaggaatattttttacaaatagaacgcaacaagcatatgaataaaaacagaaatgatatacaggagcataaaatagatatgaacactaaggggtagcagcttttataacgttccgtatttttcttagctatcaattgatttaccgtaatatttatctcgggaaactttgttctacaatattttgtttggtattccagaaactcatgtcctggcttattcccgcagcttaaaaaatgatacaaaaatgtgttattgttactaaaattaattcttcttaagaaaaactgcggaagacgctttaggtacgtctgttcctgttttagtaggaagtagtataagggacaatttctttttccacacattagattattgtaatataggtaggttggggtgttggagcgaataagttttctgagtatgttataatctatgacttgtaaatcgttataccttaggtccaaaaacttgagttctttaccaaagccacctgcaatttcagaaatatttttcatcccgcagcggataatacggatgtcctgaaacgtctttaaaatacttgtattgtagtgaatacttatgttatttttttgtaaataatctatgtcatgacaagtgcatgaaatgccagcagcattgcttggtatagtattatatgcaggaagaactatactactattgagaatagtcacattgtacttataccatgtattattttctgatataaagtatttgcaggtgacctgtggtttaatcctacctgttaagccacttcctaaaaaaacaaaaaatatgaaaacccttagcatcctgtatatactattaaaaatttataaaattttctgtttaaatttcatttagacaaaaaaaataatatatatacatcagcaagaaattatatacagattatataattttctgatttttttttgccacaataagcatcattatatgcattaaaatctcaatactaaacactaaaatctaaattctaagcattaaattctaagcattaaattctatgcactaaactgtaagcactaaaatctaagtaactaaaatcaacactaaatgtatgcaacctaaaatgtaaagcattactcatcatcctcctcttcttcatcctcatcatcataggttaagatatatgtgtcatcctccatttcttcacattcatcttcataagcatcactgggtattggtggaacattggatgcagcatttttaaaatattctatgtcttctggtgaacactcatctaatgattttttgacagtccttttaacttccatgggatatgattccaaatcctctttatataagagtttacggtagcttttagctgcatccacatttgctggagaatctggatttggctcattgagcagtgaaattacactaagaagaatggtatcaatcttttgagccggagaccaagtcattccctgttcttcagcattgtctccgtgtaagatagagatacatagttttccatcagagtaaatattaggatgccacatttcagaggtgaatgttaatctgggtggtgcatatgggtattctggaggaaaggcgatttttgccttgaataagcctccctcataaaaagtgtcaggtgggccccttaagatcacatcccattcagtcatatccttctcattcaccgaaattttgaaattctcagagggattctctatcaggtgtctgtactctgctattaaaaacctggaaaccatggttatttaatattaattaaattccctggtttattcctccttaaaagtagatgaacctcttttgttttttattgggttcatttttactaaatttatgaactggaaaaaactttaacggcataattatcaaatgcgaagggggatccgtataaaatcctagcttgccggtaatggctattaagttaaatttggtaccagtaacactaatatttaaaaagccctgatcattaactttccacattaaaagattattatattcgaatgtttgtccaatatggacaactttgtcaccagatgttacatttgatttggttgttagtggctgaagcttggcacaatcaaaaataagcccattaacactaagatatagaggagtgggttgatctattttctcatagtttaatattccatctttccacgtaatagcttgataattatccgcagcaatgagttgaaattttataaatagtacaggggttttagttgtcgttatacatttaaagggtgttttataaaaataaaaaataataattgttaaaagtatgataataatcgccaaaataatttcatacattttttataagaattatacatagtatggtatttaaaatattagctaaatttaaaaaaacttcatgatttttaaaacagggaaaaaggggattaggttgaataaaaaaggtaagcacttgtctatatattttttttacaatgttgccttgagtcgcatttttaactggctggggagtatcagagtggaatatcactgtagtaggtctataaggtcttgttaaaatatgatcggtcattgttttcgtactagtgtcatttagggtcgacctgatagctcgatataaagttataggggataacctatcaaatacagtcttatctgtgctgaaatgtatatcgtcttctttatcactaataatattaggaatggctgtcattaaataattactacttgttgttgtgggtgaaatagttgtactggtattattggaaatggctgtcattaaataattactacttgttgttgtgggtgaaatagttgtactagtattattagaaatggctgtcgttaaataattactacctattacaagtaaactaatgctaactacatttttaacctcaataaacctaaaaagccatactaaatacctaaacaacatcctgttataatatgagcagaaaaaaaaaataagtataattagggaattattcttattcgcttactattaagaataattcagaatcttatttagttagaaactatcataaagtgaataggactcatcgtcggatgaagattccgtttcagagatagtttctttttcttcctcagaataatctgttcctacaatagaatcggtgtcatcctcagaaagagaagtatttaaatatggactatctatagcaatatcctcttctatctcgcaatcctcctcctccatttccatagtgtgtaggagaatatttttatcatcatgctcacttctttttttgttgaaagatgaaccgtcctcaatacggttcatgttaagttccttcatcttatgtataatttccgtaatccgtgatgtttttgacatgtaagatggttttaaggttatatccacaataacaggagaatctctatcattttcatttgataaactttgatctttgatttcttcgtctaaaattcttgtctttttttgggtactagatgaaatagaggaattcatattctgaaacgatatatcaaggggagctggacgcttttttccaattaaaccgtttttcgagatactatgattagatgaatgatctttagccaagctgtccttggatatactatagttagatattttacctttaaataatattcttctatacaagttattcttaggtaaagaattagtatggattcctatatttttatctgaaggagtgtccatatcggagaacgtcctcttacgaatattttgaccacgagccatttcatccactataggcagtattttggctggctatggttctttgttgtgacaattctatgagatttgattgcaaatcaatttttagttttaaatatattggtacctaggacaaagaaagtatatatagccaataattattccactaaattgatttccagactgatgggtatggagccatgttgtctctgcagacgatcgcaaaaatggccgtagcaacaaacacctactccaagtatcactatccaatactgaaggtctttgggctgtggtggaaaaacaatacgctaaatggccctattaaaatatgtaaccattgcaacaacataatggtaggagaatatcctatgtgttacaatcatggaatgagtctggatatagctttgattcgggcagtaaaggagcgtaatatatccttagtccagcttttcaccgaatgggggggaaatattgactatggggcactttgtgctaacactccatctatgcaaagattatgtaaaagtttgggagccaaaccaccaaagggccgaatgtatatggatgctcttatacatctttcagataccttgaatgataatgatctgattagggggtatgagatttttgatgataatagcgtgttggattgtgtcaatctcatacgactcaaaataatgcttaccttgaaggcccgtatacctctcatggaacaactagaccaaattgccttaaaacaacttctgcagcgatactggtatgccatggctgtacaacacaacttaacaatcgctatccactattttgataatcatattcctaatataaagccatttagtctgcgctgtgctttgtattttaatgatccctttaaaatccatgatgcttgcagaactgtaaatatggatcctaatgagatgatgaacattgcttgtcaacaggatttaaactttcaaagcatttactattgttatcttttaggggctgatattaatcaggctatgctaatgtctttaaagtatggtcatctttctaatatgtggttttgcatagatttgggggcggatgcctttaaagaggcaggggcgcttgctgagaaaaaaaataaaagagtgttacaacacatattaggtcttaatatctttaagcgagagttgattcccccctgtaaagatcctgatccttatcaaatccaaattctgttaaaaaactacattctaaaaaatgtctcaactgtttttacatattattgccagtagccattgtttatatcagaaaataacccatttgtttatctttttttgtggggcaaccattaagacccgacgcaaaaaaagattaatcttttatcagatacctaaaacgttctataagggagtctatgagatggatcatattttgatggtcatagtaagaagcaagctttttggcgaaaacaacggagttaaagaatttaacccgctcatgtttggataggacttttaacagcgagccaaaacagtatttaaaaatttggcaatagtttttttgggatgcaataaacaaacacttgatcagtgcccgcttcactttctgatcagacatgtttgccgcataacaggcctttttaaacttagtaatataattatgttccgcaagcaccattaacaagggaacgatgggaagctgcttttcttggtgaaatttacgtaaatattcgatggccaccgcttggacgactgtgtaatttactaagttagaaatgatagctttcatggttgtaaaaatatacataggattttctttttctgtatacagtttgaaaagcttatgattacgtgaaatgatggccatttttaatacaagatggtatagtgtatctttaggtaaaaatgccttgcaagccgcgatgatgtcgatgttgtctccatgaacagcgatagaaactaatgtttccaatctaaatgtttttatctgcattaatagaagaatgcagtcaatgttattatacttaataatactgtaatacaccgaatcaatgaccgtcatctgagaatcaagctgacttattagtaaatttaacgtttttttggaggcatgacctttgatcgcggcactaagtgcacacagtatagcaaaattgttaaatacattttgatttaggagaaggagtaatattttccttcggttatagtacgcagcatctgtgatgattattggccgataaatgttaaaatgtgttaacagctttttaaaaaaacggaagtaatttttttggatcgctgtttgcatcatcgaaataatgagataatcagggtatataatgggtaggtcacatgctacctctaacaaagaatagtcgcccaatctaaaggctgtgttgaaaagcgtactatcatcatacgtatcgagtacccctgctgttacaaaccaagcgataagatgaatgtgccgttccttgcaagctatcgcaaatagggagtttcctatggaatgtcgaataatgtactccctatttttttccaaaatgtttggaaaattgtatagcgttgcggcatacagtagacactccattctggcgttataatttttacttttacatatgaataggtggaagaactcgaataattcttgagaacttgttaaatgcataatatggtgatattttggtgtcgttaaatggtatgagaaaatgcattctaatacatcttttcggttatgctttagcgcctgagctaaggcatattcaggctcgacccataggactagtgtttctataattgagatattcgcctgctttgccagggcatactttaagacgctccggttagaaaaaatgttgttatgaagatggataaccgtatccatttttacgatgggaccattccagtatagtcctaaatgctgtagcagatcttttgttagttgtgaagcgttctcgggtgtcatataaatatgttgcagggcttttttctgtaaggagaacatttcgtcgtaatcgtacaaaaaaaaattaaaatttgggcatggatgattcaaacataacaaaatcaagattttataacagtttgcattaacctatacatatatgcaagtaaatgagatattatctatcataacgaatcaagggatatttgtatatatcaggagtttctgaaataaagatatgaagattatcatagtagtatccatcaatcacaatgcaacttcctttaaggcataatttagtaaactcagcactcccatcttctggatgctttacaactaacattaaaaactcctcagtcatattatctgtaataaaataagatcctcctggagccatttgtagcatgtctcttattcctacaaaatcttttttgggatggtaaaaactcagcagtttcaaactcttttttagttttttttcctggtatttaagccatttgttataaaacagttttcttatgaaaatgcatttgaaaatattgggaatgtttaaccatgcttcttccgagcacatctccagatacttactttctttgtttcccatgtctaatttattgctcactaagttagtaatgaatctattttaataatctactttactaatctatcttaataacctatcttataatctatcttaataacctaattataacctatttataattggctaatgctgccggcatttcatgcctatctaaacaactcctactaagcaatctactattacatatatagattcactttttatatttgtaaatcatgagaattataaaatcattactcatttttattgtaaattagtgggtatttgtaaaaatcttcaaacgttttaagatagttttctagagagaagtaatctttgccatcaatatataatgcttttcctttaaactccagttttgctatgtttagtgagccgtttctagatctttttgggcaataaatagattttcattggttgcatcgtccgtaagcagaaaggtaccactaggcacgttaaaaaacatacgttctatttcatggtcggatttttgagaatagaaaaaatctaattttttaatccgcgttaactcttttttatcaatctttccagactgttttatatatactttattgcaaatcttacaatcctctatggcttcattatacttattttgcttatcctctattgacatgtccgtatttgataggtaacttccgttaaggcggttccccatggttttagatagatttttaattcagttgtatacttttattatgaggctaaaatatagaagtttgatcctaaaaaaataaaaagattttgtacatttatttatggtttatagcggtatagaggccgataaaaggtatccgggtagtctcctatgatatcgtcaattttggtataataacagttgttatggtagtattgtccaaaccgagtatgtatgcgccggtgaagcgtccgcccgctaatggtacagttccaggttaagacaatcatatcacacccaaaaagagaggaaacagcataggtgcccaaaggttcattatataacatacgccgcatatattttagttttttttctccatggtaataatcacaggttttcatgtcctgcttaataggatgattccccatgtatgataatatataataaatttagtttttagctttttcaaaaaattgggcgctcgaaactaaattttccttatcacagcgtttggagaaagcgtatttaaagatatatcttcttctaacaagactgcaaaaaaaatcttaccccttatttttataatgttcatcatagcgtttgaagatatcagaaggtgccaggttttataaaaatatcctttaggatttataacgatacaagggtctataaaatatatgcgggtataatcttataaaatcatcgattttttcataatattctccgtttatacaataaagatcataacagatattgatgcgtagatgcattattcgcgtgttcgttgggcagctaaaggatatcacaacgtagttttttttaagaaaagacgaaactacataagtccctaagggttcattgaatagtaaacgccatatttgttttaaattttgttgttcaccatagtagtattcgcactttttcaagtcttttttaataagcctattccccatgtatgcttataaataaaaatttagaaatgtgctatattatttgttgatgaatcatgaacacgtcttatatgttgatatgttactttaaaaacatttgtattttcaacagacgcgttctattcttattaagaatgatgccgtctttattttaaaccttggtttaaaatttaaagaagtatttataaactataatcatgggaactttttcagtaactgcctctgcaaaaagtgacgatgctgtttgtaagtatttagaagaaccaatagatgaaaattacagaaacatattaagaaatgagcatgttaaaaaaaatttaaatgaggctctgaatcgacatattactacctataatccagtagttgattggtgtaataactattcaacattttcatctcaggatttcgatgaatataaaatttatatacatagcgatcttatggatggacgacctcgtccaaaaaaaacatggtgtgtcatcatgtaatgtttgttagttttatataaacgcaaaaatattcttctaggagatgttgatatactacctattgaattcaatatattaaagtacatttctggctattcccattacggtattattattactatttttaagagctagatgtggatttaagtaataataacattctcccgttcctcctagagacacctcatcaaattcccatcctatgcaacctttatgttgtaaacataatgattgacagcattcatcttcttttgaccaagtcgtccaaatcctaccaagatctatacgtgtttttccaaatggagattgaagatcagcagtagtggcattaaacctataaaaaccaggtgcataatcacatgaacggatcgtaggatctaatttaatatcttttatatcttgttttactgcttctagacaacttttatcagtacatgttccacgtacacagtggtgtcctttatccttacaatccgtatctgtcttacatttttttttcggcggtttatgtttcagatggtaaaaacccagtattaaaataatcacaagaataattcctataagtacttgaacaacaggataaaacattttaatattaaatatattttttaattaaatgaatagatttaatccaagtagtattaaaattttttagaaatagtgttctacaaataatgaaatgaatggtccaaaaaaaataaggtgtacaataatgtaatatattgttaggctaagtaaatttaatattttaaagtatttggaaaaatattttttaacatatgatgtctaggaatattttttagacatttaaaaccatatagttactttatttattacactgaacttgaaaagacttattacctaaaatattaatagatgaagtaatattgtgtaattgagtccataacatgggtgggaaacaaaaatctcgtaatatgaaaaataaacatcctaaaaagagtgcaattgttataagtttatgtaactttattttaaagtaagaatataaaaatatgagtacaagaggaataggggccattactaacattggctccaacatcctgttgtctacaaaaaaaaatattttttttagcaaaaaaaaatccatggaaggatattaatacacataattatttgacatcacattagtgtacttaccaaatagtaatatacaaccatcctaatattcacctttatgaaatgatcccaacctatacggtaaaatagtataggttttaataaagaaaaaagatattctgtggtttttatttttgtatagtgtgtgaatacaaaataaaatcccaaattttaaccttttctttttttttctatacaggatgttagaaatagtattggcaacgctgctaggcgacctgcagcggctccgggttcttacccctcagcagcgggcagttgccttctttcgagccaatactaaggagctagaggacttcttatgctcagatgggcagtctgaggaggtactgtctggcccccttcttaaccgtctactagaaccctcaggccctcttgatattttaaccggatatcacctatttcgtcagaatcccaaggcaggtcagttgcgcggccttgaggtcaagatgcttgaacggttatacgatgctaatatttacaatatactgtctcggctgcggcctgaaaaagttcgcaacaaggctattgagctatactgggttttccgagctatccatatttgtcatgctcctttagttttagatattgtacgatatgaggaaccggactttgctgaactggcctttatttgtgctgcttactttggtgaacctcaggtaatgtatttgctctacaaatatatgcctctgacccgcgcagttcttacggatgccatccggataagtcttgagagcaacaaccaggtagggatttgctatgcttacttgatgggaggcagcctcaagggactagtctccgccccactgcgtaaacgtctgcgcgccaaactacgctcgcagcgcaaaaagaaggacgttctttcaccccacgacttcttactgctgctccagtagctttttttgccgcaggagcaccgcggataggagctcctccacgctcgcgatccggcgctggaagcggaaccgatcgaccgccacctgctcccagggacccttgcgctcgatgtcgtcggcttcccacacctcgacggctgtggcaaaatggacatgcttcgcgtcgttcgtccgttttttgcgccgcctccccattattcttcctgtaagattagtgtttaatacctataataacataattttaagatttaatataccaaaacttaaactatttttgtatagtaactattagcatgtctacacatgattgttctctaaaagagaaaccggttgatatgaacgatatatctgagaaatcagttgtcgtggataatgcacccgagaaaccagctggagcgaatcatatacctgagaagtcggcccgcgaaatgacatcatcagaatggattgctgaatattggaaaggtataaaacgtggaaatgacgtgccatgttgttgtccaagaaaaatgaccagtgcagacaaaaagttttcagtatttggtaagggatccctaatgcgctccatccagaagaataattaaaaaaaatattttttttagcaagtttttaaactatttaaataaatgtggtaaaaaaattcacataataattaaagtgaacgtgttagaattaatatttttttataatcggatataatatccattaaatcaataaatgatagtgttgctaccacactaaacaataacaaacagaaacgcacgatacctttcctcatgatttataatagcgtgttatctaaagatttttttgaaaaaaatattaaattttagttgattatttttttcagttacaacattgctttagaaaaaatacctaattactacatagcaaataaagcgagcgcattgttacaaacaacatttttttgcgcctggatactcctatatatgagaactataatacggtatattaatcctattaccaacattgtcaataatagtatgtaggcaatgacatactttaaataccaaatatccatggttatttctaaaaatcttgaaaaaacgttaaattttagatcggtcacctacgacagtaatactaattttaataattgatgactgaaatcataatataatgccgtgcgaaaaataattatttttcggttaaagataccattacataaaaaatatgccatctactctacaagtgcttgctaaaaaggtattggccttaggggagcataaagaaaatgaacatatatctagagaatattattatcatatattaaagtgttgcggtttatggtggcatgaagctccgattatactttgttatgatgggagtgagcaaatgatgataaagactccaatctttgaagaaggcatattacttaatactgcattaatgaaagctgtacaggagaataattatgaattaataaagttgtttactgaatggggagcaaacatcaattatggattaatttccattaataccgagcatgcccgggatctatgtcgaaaattaggagctaaagaaatgcttgaaggaaatgaatttatacaaattatattcaaaacattagatgataccaccagtagtaatataattttatgtcatgaattattcaccaacaatcctcttttagagaatgtaaatatgggggaaatgaggatgataatttattggaggatgaaaaatttaacgaacctattattaaataatgactctattagtgaaatattaactaaattctggtatggtatagcagtaaaatataatcttaaggatgcgatccaatatttttaccagagattcatggacttcaacgagtggcgagtaacatgtgctctttcttttaataatgtgaatgatcttcataagatgtatataacagagaaggttcatatgaataatgacgaaatgatgaatctagcctgcagcattcaagacagaaatttatcaaccatttactattgttttctattggggggctaacatcaatcaagcaatgttaacctcagtattaaattataatatttttaacttattcttttgtatagacttaggggctgatgcctttgaagagggtaagaccctggcgaaacaaaaggggtataatgaaatagtggaaatcttatcattagatatcatttatagtccaaatactgacttctcatcaaaaatagaacctgaacatattagttctttgttaaaaaacttttatccaaaaaatctgttcgcttttgatcgttgcaaccccggtttatattattcttagaggaccgctacaaaaattatttttttttcttgatcaaagctccaaaataattattagattaaagtcgcctatagcagcagcccactccaaaaaaagtattttatagtacaaaaaacacgaaaaatagtttgcggccggcggcaaactatttgttgttgtctaaaacttaatgtttttttaatatttttaaatgcaaccatggattgttggactatcagggagaagaactatagctacatcatattgtcaatactggtaatactattaatatggtatcttatacttaactattgtcgatcgaaaaaaaatgcagttacaaacaacatgccgccaccatacacggtgtcaagtagctgttctcaataatagggttgattgacgctcttcgtaataatatgttgattgacgcatcataaaatgctgtggttgattaatatgttgattgtcgcctactttattatataagtaatgatttttgtataaaatacgggtttgtgagggctttattttttcttattagaacaaagcatgcaatttaaggcctacagcaagagtaatttaacacctacaacagtaattttaaggtcagtaataatgtttaattaaggcctgaccactaaaacttaaacgattttgtaaaaaaaaatgtctactccactttctctacagactcttgttaaaaaagtgctggccacacagcacatatctaaagaacactactttattttgaaatattgtggtttatggtggcatgaagcgccgattacgatttgcattgatgaggatagccaaatattgataaaatcggcaagcttcaaagaaggcttatctttagatatcgcattaatgaaagtcgtgcaagaaaataaccatgatttaatagagttgtttaccaagtggggtgcagatatcaactctagcttagttactgttaatacggagtatacccggaacctttgtcagaaattaggcgcaaaggaagctttgaatgaaagggatattttacaaatattttataaaacacgtcatcttaaaactagcagtaatattattttatataatgaattgttttctaataatctccttttccaaaatatagagagattgagtttaatagtttataggggcttgaaaaacttatcaatcaactttatattggatgatatttcatttagcgaaatgttaactagatactggtatagtatggcgatattatataaccttactgaagccatccaatatttttatcaacgatataggcattttaaagattggcggcttatatgtgggctttcttttaacaatttgtctgaccttcatgaagtatataacttagagaagacggatatagacattgatgaaatgatgaagttgacctgtagtacgtatgatggtaattattcgactatttattattgttttatgttgggggctgacatcaatcgggcaatgttaacctcggtaataaactttcatattggtaacttgttcctttgtatagatttaggagctgatgctttcgaagacagcatggaactagcaaaacaaaagaataataatatattagtagaaatattatcatttaaaaattattatagttcaaatacctctcttttatcaataaaaacgacagatccggaaaaaattaatgccttattagatgaagaaaagtatgagtcaaaaaatatgttaatgtatgaagaattatctcattgatacaaaattattttttataacagaactctctgatggtgacaaatctccgataggaatatatgacgtaacataattatttttttcgcccagaaaaaaattataaatgttattattgccagcacttttatcaactatacgtacaaaaaggtgttgaccaaaaaaataattttttttcttgatcaaagtatgtaaacgcccgcttacagcaaggatcttaagtgagagccattaaattttattgatagctgcttgccaccagtagaatacggccaaaccacctaacaggaaatacaaggcggcccttcggccaataaggtggataaaaatcacgcataagacggttgtaacatagcactttagtgcgaatatcaggaatgccaatagcatgtagataaggcaccaaacatcgcagctatacatggctaaagatcaaccagaaaaggtttaaattttaacgccggcccaaaacttaaactttttttgatatttttaagtgcagccatggattggtccggccataggatgacctatgcctacgtggcattctcattgatggcaatagcaataatatggtatattctacttatctattgccgatcgaaaaaaaatgttgttacaagcggtaatacgctcgctttagcgccaatatcgcatatgtgaaaaatgttcgccgaaaaaaacattaaaatttagaaccgccgcggcatctcaggggcggcaacatttttttttatatggatattgtcacacaccacctcatctatgacgcaatatattactgctaatatcaggttccccaatagtatgtagagaaaccacacaagatagatattcatggcgatttttgacgaaaaaacattaagttttagcttctttgacgcctgtgtactaataatgtttaacgcctgtagtataataattgatacctacagcagtaattgatacctacggcgataatgtctctctggccgccccaaaaaaaagtatttacggtagggtttattaccggcggcgtaacaccagttatggtcaattttgtctggcccgccgcccagccgcaaaaaaaaatcaattacaaccgcaaaaaaaaatatttccggccgcggcgtttcaaaaaataatctttgcgaaataattccgcatcttgtgaaatgaacgcctacagtaataattttaatctttgacacctacagcagtagtaataattttaatctttaacgcctgcagcagtactaatatttttaatctttaacgcctacagcagtagtaataattttaatgtttaacgcctacagcagtagtaat

SEQ ID NO: 2 - protein, 9 aa, Artificial Sequence
  Synthetic peptide
STNEDNQLM

SEQ ID NO: 3 - protein, 10 aa, Artificial Sequence
  Synthetic peptide
NEMDIVQIFY

SEQ ID NO: 4 - protein, 9 aa, Artificial Sequence
  Synthetic peptide
EMDIVQIFY

SEQ ID NO: 5 - protein, 9 aa, Artificial Sequence
  Synthetic peptide
SNNPLFQNI

SEQ ID NO: 6 - protein, 10 aa, Artificial Sequence
  Synthetic peptide
KLTEAIQYFY

SEQ ID NO: 7 - protein, 10 aa, Artificial Sequence
  Synthetic peptide
RDSNFLTIYY

SEQ ID NO: 8 - protein, 11 aa, Artificial Sequence
  Synthetic peptide
RAMVTSVKNFY

SEQ ID NO: 9 - protein, 10 aa, Artificial Sequence
  Synthetic peptide
AMVTSVKNFY

SEQ ID NO: 10 - protein, 9 aa, Artificial Sequence
  Synthetic peptide
MVTSVKNFY

SEQ ID NO: 11 - protein, 9 aa, Artificial Sequence
  Synthetic peptide
VTSVKNFYM

SEQ ID NO: 12 - protein, 9 aa, Artificial Sequence
  Synthetic peptide
SSNVSLLSL

SEQ ID NO: 13 - protein, 9 aa, Artificial Sequence
  Synthetic peptide
SSCEFTPNF

SEQ ID NO: 14 - protein, 9 aa, Artificial Sequence
  Synthetic peptide
ANINYGLLF

SEQ ID NO: 15 - protein, 9 aa, Artificial Sequence
  Synthetic peptide
NSMLNEISF

SEQ ID NO: 16 - protein, 10 aa, Artificial Sequence
  Synthetic peptide
MLNEISFSEM

SEQ ID NO: 17 - protein, 9 aa, Artificial Sequence
  Synthetic peptide
MSINKMMEL

SEQ ID NO: 18 - protein, 9 aa, Artificial Sequence
  Synthetic peptide
ANANRAMLI

SEQ ID NO: 19 - protein, 9 aa, Artificial Sequence
  Synthetic peptide
KTLADIYGY

SEQ ID NO: 20 - protein, 10 aa, Artificial Sequence
  Synthetic peptide
TLLSIPTLLY

SEQ ID NO: 21 - protein, 9 aa, Artificial Sequence
  Synthetic peptide
CTYANHCRF

SEQ ID NO: 22 - protein, 9 aa, Artificial Sequence
  Synthetic peptide
YANHCRFCW

SEQ ID NO: 23 - protein, 9 aa, Artificial Sequence
  Synthetic peptide
KVFENHSPI

SEQ ID NO: 24 - protein, 9 aa, Artificial Sequence
  Synthetic peptide
HSYPMEHCM

SEQ ID NO: 25 - protein, 9 aa, Artificial Sequence
  Synthetic peptide
YMESCQFCW

SEQ ID NO: 26 - protein, 9 aa, Artificial Sequence
  Synthetic peptide
MTNDLIMVV

SEQ ID NO: 27 - protein, 9 aa, Artificial Sequence
  Synthetic peptide
YIKIHQHYY

SEQ ID NO: 28 - protein, 10 aa, Artificial Sequence
  Synthetic peptide
KIHQHYYINI

SEQ ID NO: 29 - protein, 9 aa, Artificial Sequence
  Synthetic peptide
IHQHYYINI

SEQ ID NO: 30 - protein, 10 aa, Artificial Sequence
  Synthetic peptide
IHQHYYINIY

SEQ ID NO: 31 - protein, 9 aa, Artificial Sequence
  Synthetic peptide
HQHYYINIY

SEQ ID NO: 32 - protein, 10 aa, Artificial Sequence
  Synthetic peptide
HQHYYINIYM

SEQ ID NO: 33 - protein, 8 aa, Artificial Sequence
  Synthetic peptide
HQHYYINI

SEQ ID NO: 34 - protein, 10 aa, Artificial Sequence
  Synthetic peptide
QHYYINIYMY

SEQ ID NO: 35 - protein, 8 aa, Artificial Sequence
  Synthetic peptide
QHYYINIY

SEQ ID NO: 36 - protein, 9 aa, Artificial Sequence
  Synthetic peptide
HYYINIYMY

SEQ ID NO: 37 - protein, 10 aa, Artificial Sequence
  Synthetic peptide
HYYINIYMYL

SEQ ID NO: 38 - protein, 9 aa, Artificial Sequence
  Synthetic peptide
YYINIYMYL

SEQ ID NO: 39 - protein, 10 aa, Artificial Sequence
  Synthetic peptide
YYINIYMYLM

SEQ ID NO: 40 - protein, 9 aa, Artificial Sequence
  Synthetic peptide
YINIYMYLM

SEQ ID NO: 41 - protein, 10 aa, Artificial Sequence
  Synthetic peptide
YINIYMYLMR

SEQ ID NO: 42 - protein, 10 aa, Artificial Sequence
  Synthetic peptide
INIYMYLMRY

SEQ ID NO: 43 - protein, 9 aa, Artificial Sequence
  Synthetic peptide
NIYMYLMRY

SEQ ID NO: 44 - protein, 11 aa, Artificial Sequence
  Synthetic peptide
YMYLMRYTQIY

SEQ ID NO: 45 - protein, 10 aa, Artificial Sequence
  Synthetic peptide
YMYLMRYTQI

SEQ ID NO: 46 - protein, 10 aa, Artificial Sequence
  Synthetic peptide
MYLMRYTQIY

SEQ ID NO: 47 - protein, 11 aa, Artificial Sequence
  Synthetic peptide
MYLMRYTQIYK

SEQ ID NO: 48 - protein, 9 aa, Artificial Sequence
  Synthetic peptide
MYLMRYTQI

SEQ ID NO: 49 - protein, 9 aa, Artificial Sequence
  Synthetic peptide
YLMRYTQIY

SEQ ID NO: 50 - protein, 11 aa, Artificial Sequence
  Synthetic peptide
YLMRYTQIYKY

SEQ ID NO: 51 - protein, 10 aa, Artificial Sequence
  Synthetic peptide
YLMRYTQIYK

SEQ ID NO: 52 - protein, 8 aa, Artificial Sequence
  Synthetic peptide
YLMRYTQI

SEQ ID NO: 53 - protein, 10 aa, Artificial Sequence
  Synthetic peptide
LMRYTQIYKY

SEQ ID NO: 54 - protein, 9 aa, Artificial Sequence
  Synthetic peptide
LMRYTQIYK

SEQ ID NO: 55 - protein, 9 aa, Artificial Sequence
  Synthetic peptide
MRYTQIYKY

SEQ ID NO: 56 - protein, 11 aa, Artificial Sequence
  Synthetic peptide
MRYTQIYKYPL

SEQ ID NO: 57 - protein, 10 aa, Artificial Sequence
  Synthetic peptide
RYTQIYKYPL

SEQ ID NO: 58 - protein, 11 aa, Artificial Sequence
  Synthetic peptide
RYTQIYKYPLI

SEQ ID NO: 59 - protein, 9 aa, Artificial Sequence
  Synthetic peptide
YTQIYKYPL

SEQ ID NO: 60 - protein, 10 aa, Artificial Sequence
  Synthetic peptide
YTQIYKYPLI

SEQ ID NO: 61 - protein, 9 aa, Artificial Sequence
  Synthetic peptide
TQIYKYPLI

SEQ ID NO: 62 - protein, 8 aa, Artificial Sequence
  Synthetic peptide
TQIYKYPL

SEQ ID NO: 63 - protein, 9 aa, Artificial Sequence
  Synthetic peptide
YMERCKFCW

SEQ ID NO: 64 - protein, 9 aa, Artificial Sequence
  Synthetic peptide
KVNNSMPLI

SEQ ID NO: 65 - protein, 10 aa, Artificial Sequence
  Synthetic peptide
VSRWYNQCTY

SEQ ID NO: 66 - protein, 10 aa, Artificial Sequence
  Synthetic peptide
CTYGEGNGHY

SEQ ID NO: 67 - protein, 9 aa, Artificial Sequence
  Synthetic peptide
HVMDCSDPV

SEQ ID NO: 68 - protein, 9 aa, Artificial Sequence
  Synthetic peptide
YMENCKFCW

SEQ ID NO: 69 - protein, 9 aa, Artificial Sequence
  Synthetic peptide
KVNKSMPLI

SEQ ID NO: 70 - protein, 11 aa, Artificial Sequence
  Synthetic peptide
KSMPLIVENSY

SEQ ID NO: 71 - protein, 9 aa, Artificial Sequence
  Synthetic peptide
CTYAKSCDF

SEQ ID NO: 72 - protein, 10 aa, Artificial Sequence
  Synthetic peptide
HIMSCTNPTY

SEQ ID NO: 73 - protein, 10 aa, Artificial Sequence
  Synthetic peptide
IMSCTNPTYY

SEQ ID NO: 74 - protein, 9 aa, Artificial Sequence
  Synthetic peptide
IMSCTNPTY

SEQ ID NO: 75 - protein, 9 aa, Artificial Sequence
  Synthetic peptide
MSCTNPTYY

SEQ ID NO: 76 - protein, 9 aa, Artificial Sequence
  Synthetic peptide
TYYDWFDEL

SEQ ID NO: 77 - protein, 9 aa, Artificial Sequence
  Synthetic peptide
YYDWFDELM

SEQ ID NO: 78 - protein, 9 aa, Artificial Sequence
  Synthetic peptide
TNIIMNLPL

SEQ ID NO: 79 - protein, 9 aa, Artificial Sequence
  Synthetic peptide
CTYAKHCDF

SEQ ID NO: 80 - protein, 10 aa, Artificial Sequence
  Synthetic peptide
GLNRPLSIFY

SEQ ID NO: 81 - protein, 9 aa, Artificial Sequence
  Synthetic peptide
CTYGKHCDF

SEQ ID NO: 82 - protein, 10 aa, Artificial Sequence
  Synthetic peptide
YISQCSIARY

SEQ ID NO: 83 - protein, 10 aa, Artificial Sequence
  Synthetic peptide
YMDCFQPTAY

SEQ ID NO: 84 - protein, 9 aa, Artificial Sequence
  Synthetic peptide
KVLGLLLGY

SEQ ID NO: 85 - protein, 10 aa, Artificial Sequence
  Synthetic peptide
KSELSYWCTY

SEQ ID NO: 86 - protein, 10 aa, Artificial Sequence
  Synthetic peptide
SMECLHPRPY

SEQ ID NO: 87 - protein, 9 aa, Artificial Sequence
  Synthetic peptide
LSIKQYCLY

SEQ ID NO: 88 - protein, 10 aa, Artificial Sequence
  Synthetic peptide
VLNRPLSIFY

SEQ ID NO: 89 - protein, 10 aa, Artificial Sequence
  Synthetic peptide
HYMNCSLPTY

SEQ ID NO: 90 - protein, 10 aa, Artificial Sequence
  Synthetic peptide
YMNCSLPTYF

SEQ ID NO: 91 - protein, 9 aa, Artificial Sequence
  Synthetic peptide
YMNCSLPTY

SEQ ID NO: 92 - protein, 9 aa, Artificial Sequence
  Synthetic peptide
NSNDFHLLI

SEQ ID NO: 93 - protein, 9 aa, Artificial Sequence
  Synthetic peptide
FVYNRFILY

SEQ ID NO: 94 - protein, 10 aa, Artificial Sequence
  Synthetic peptide
MTRNTLVLKF

SEQ ID NO: 95 - protein, 9 aa, Artificial Sequence
  Synthetic peptide
NIDEVHHAY

SEQ ID NO: 96 - protein, 9 aa, Artificial Sequence
  Synthetic peptide
RALERLISF

SEQ ID NO: 97 - protein, 9 aa, Artificial Sequence
  Synthetic peptide
HSNIMILLF

SEQ ID NO: 98 - protein, 9 aa, Artificial Sequence
  Synthetic peptide
STYKNTESF

SEQ ID NO: 99 - protein, 10 aa, Artificial Sequence
  Synthetic peptide
STYKNTESFY

SEQ ID NO: 100 - protein, 9 aa, Artificial Sequence
  Synthetic peptide
KNTESFYPF

SEQ ID NO: 101 - protein, 9 aa, Artificial Sequence
  Synthetic peptide
KMIKNTYVL

SEQ ID NO: 102 - protein, 9 aa, Artificial Sequence
  Synthetic peptide
NVDEIHHAY

SEQ ID NO: 103 - protein, 10 aa, Artificial Sequence
  Synthetic peptide
NVDEIHHAYF

SEQ ID NO: 104 - protein, 9 aa, Artificial Sequence
  Synthetic peptide
SNVHFCISL

SEQ ID NO: 105 - protein, 9 aa, Artificial Sequence
  Synthetic peptide
STYEYTETF

SEQ ID NO: 106 - protein, 9 aa, Artificial Sequence
  Synthetic peptide
YVENTVLLY

SEQ ID NO: 107 - protein, 9 aa, Artificial Sequence
  Synthetic peptide
LSWGASPEY

SEQ ID NO: 108 - protein, 10 aa, Artificial Sequence
  Synthetic peptide
KILERLTMSY

SEQ ID NO: 109 - protein, 9 aa, Artificial Sequence
  Synthetic peptide
ILERLTMSY

SEQ ID NO: 110 - protein, 9 aa, Artificial Sequence
  Synthetic peptide
KNYSLSTLY

SEQ ID NO: 111 - protein, 10 aa, Artificial Sequence
  Synthetic peptide
YSLSTLYCIF

SEQ ID NO: 112 - protein, 9 aa, Artificial Sequence
  Synthetic peptide
KSFAYLTGF

SEQ ID NO: 113 - protein, 9 aa, Artificial Sequence
  Synthetic peptide
RIITIKGYY

SEQ ID NO: 114 - protein, 10 aa, Artificial Sequence
  Synthetic peptide
RSDIDHMYAF

SEQ ID NO: 115 - protein, 9 aa, Artificial Sequence
  Synthetic peptide
YAFSQNNFW

SEQ ID NO: 116 - protein, 9 aa, Artificial Sequence
  Synthetic peptide
MQSLFNIAL

SEQ ID NO: 117 - protein, 9 aa, Artificial Sequence
  Synthetic peptide
LTLKNHVEF

SEQ ID NO: 118 - protein, 9 aa, Artificial Sequence
  Synthetic peptide
KRDNYMLAY

SEQ ID NO: 119 - protein, 9 aa, Artificial Sequence
  Synthetic peptide
GANEKFAHY

SEQ ID NO: 120 - protein, 9 aa, Artificial Sequence
  Synthetic peptide
KNIEFEIYF

SEQ ID NO: 121 - protein, 10 aa, Artificial Sequence
  Synthetic peptide
NIEFEIYFAR

SEQ ID NO: 122 - protein, 10 aa, Artificial Sequence
  Synthetic peptide
IEFEIYFARL

SEQ ID NO: 123 - protein, 11 aa, Artificial Sequence
  Synthetic peptide
IEFEIYFARLY

SEQ ID NO: 124 - protein, 10 aa, Artificial Sequence
  Synthetic peptide
EFEIYFARLY

SEQ ID NO: 125 - protein, 9 aa, Artificial Sequence
  Synthetic peptide
FEIYFARLY

SEQ ID NO: 126 - protein, 11 aa, Artificial Sequence
  Synthetic peptide
FEIYFARLYVY

SEQ ID NO: 127 - protein, 10 aa, Artificial Sequence
  Synthetic peptide
EIYFARLYVY

SEQ ID NO: 128 - protein, 8 aa, Artificial Sequence
  Synthetic peptide
EIYFARLY

SEQ ID NO: 129 - protein, 9 aa, Artificial Sequence
  Synthetic peptide
IYFARLYVY

SEQ ID NO: 130 - protein, 11 aa, Artificial Sequence
  Synthetic peptide
IYFARLYVYSK

SEQ ID NO: 131 - protein, 10 aa, Artificial Sequence
  Synthetic peptide
YFARLYVYSK

SEQ ID NO: 132 - protein, 9 aa, Artificial Sequence
  Synthetic peptide
FARLYVYSK

SEQ ID NO: 133 - protein, 10 aa, Artificial Sequence
  Synthetic peptide
ARLYVYSKTF

SEQ ID NO: 134 - protein, 11 aa, Artificial Sequence
  Synthetic peptide
ARLYVYSKTFY

SEQ ID NO: 135 - protein, 10 aa, Artificial Sequence
  Synthetic peptide
RLYVYSKTFY

SEQ ID NO: 136 - protein, 9 aa, Artificial Sequence
  Synthetic peptide
RLYVYSKTF

SEQ ID NO: 137 - protein, 11 aa, Artificial Sequence
  Synthetic peptide
RLYVYSKTFYR

SEQ ID NO: 138 - protein, 10 aa, Artificial Sequence
  Synthetic peptide
LYVYSKTFYR

SEQ ID NO: 139 - protein, 11 aa, Artificial Sequence
  Synthetic peptide
LYVYSKTFYRK

SEQ ID NO: 140 - protein, 9 aa, Artificial Sequence
  Synthetic peptide
LYVYSKTFY

SEQ ID NO: 141 - protein, 9 aa, Artificial Sequence
  Synthetic peptide
YVYSKTFYR

SEQ ID NO: 142 - protein, 10 aa, Artificial Sequence
  Synthetic peptide
YVYSKTFYRK

SEQ ID NO: 143 - protein, 8 aa, Artificial Sequence
  Synthetic peptide
YVYSKTFY

SEQ ID NO: 144 - protein, 9 aa, Artificial Sequence
  Synthetic peptide
VYSKTFYRK

SEQ ID NO: 145 - protein, 11 aa, Artificial Sequence
  Synthetic peptide
YSKTFYRKSWY

SEQ ID NO: 146 - protein, 10 aa, Artificial Sequence
  Synthetic peptide
YSKTFYRKSW

SEQ ID NO: 147 - protein, 10 aa, Artificial Sequence
  Synthetic peptide
SKTFYRKSWY

SEQ ID NO: 148 - protein, 11 aa, Artificial Sequence
  Synthetic peptide
SKTFYRKSWYW

SEQ ID NO: 149 - protein, 9 aa, Artificial Sequence
  Synthetic peptide
SKTFYRKSW

SEQ ID NO: 150 - protein, 9 aa, Artificial Sequence
  Synthetic peptide
KTFYRKSWY

SEQ ID NO: 151 - protein, 11 aa, Artificial Sequence
  Synthetic peptide
KTFYRKSWYWF

SEQ ID NO: 152 - protein, 10 aa, Artificial Sequence
  Synthetic peptide
KTFYRKSWYW

SEQ ID NO: 153 - protein, 8 aa, Artificial Sequence
  Synthetic peptide
KTFYRKSW

SEQ ID NO: 154 - protein, 10 aa, Artificial Sequence
  Synthetic peptide
TFYRKSWYWF

SEQ ID NO: 155 - protein, 9 aa, Artificial Sequence
  Synthetic peptide
TFYRKSWYW

SEQ ID NO: 156 - protein, 8 aa, Artificial Sequence
  Synthetic peptide
TFYRKSWY

SEQ ID NO: 157 - protein, 9 aa, Artificial Sequence
  Synthetic peptide
FYRKSWYWF

SEQ ID NO: 158 - protein, 10 aa, Artificial Sequence
  Synthetic peptide
YRKSWYWFCI

SEQ ID NO: 159 - protein, 11 aa, Artificial Sequence
  Synthetic peptide
YRKSWYWFCIF

SEQ ID NO: 160 - protein, 10 aa, Artificial Sequence
  Synthetic peptide
RKSWYWFCIF

SEQ ID NO: 161 - protein, 9 aa, Artificial Sequence
  Synthetic peptide
RKSWYWFCI

SEQ ID NO: 162 - protein, 11 aa, Artificial Sequence
  Synthetic peptide
RKSWYWFCIFM

SEQ ID NO: 163 - protein, 9 aa, Artificial Sequence
  Synthetic peptide
KSWYWFCIF

SEQ ID NO: 164 - protein, 10 aa, Artificial Sequence
  Synthetic peptide
KSWYWFCIFM

SEQ ID NO: 165 - protein, 8 aa, Artificial Sequence
  Synthetic peptide
KSWYWFCI

SEQ ID NO: 166 - protein, 9 aa, Artificial Sequence
  Synthetic peptide
SWYWFCIFM

SEQ ID NO: 167 - protein, 10 aa, Artificial Sequence
  Synthetic peptide
YWFCIFMAVK

SEQ ID NO: 168 - protein, 9 aa, Artificial Sequence
  Synthetic peptide
VLFLSACFY

SEQ ID NO: 169 - protein, 9 aa, Artificial Sequence
  Synthetic peptide
KIQQKMLSY

SEQ ID NO: 170 - protein, 9 aa, Artificial Sequence
  Synthetic peptide
KMLSYGMEW

SEQ ID NO: 171 - protein, 9 aa, Artificial Sequence
  Synthetic peptide
ATHGKVRTF

SEQ ID NO: 172 - protein, 9 aa, Artificial Sequence
  Synthetic peptide
KVRTFVCCY

SEQ ID NO: 173 - protein, 9 aa, Artificial Sequence
  Synthetic peptide
YTLGGTASL

SEQ ID NO: 174 - protein, 9 aa, Artificial Sequence
  Synthetic peptide
YQNERYMIM

SEQ ID NO: 175 - protein, 10 aa, Artificial Sequence
  Synthetic peptide
RYMIMALCSY

SEQ ID NO: 176 - protein, 9 aa, Artificial Sequence
  Synthetic peptide
FSEETQYFY

SEQ ID NO: 177 - protein, 9 aa, Artificial Sequence
  Synthetic peptide
ISLCHYCNY

SEQ ID NO: 178 - protein, 9 aa, Artificial Sequence
  Synthetic peptide
YVILSSTPF

SEQ ID NO: 179 - protein, 10 aa, Artificial Sequence
  Synthetic peptide
FTEWGANIYY

SEQ ID NO: 180 - protein, 10 aa, Artificial Sequence
  Synthetic peptide
KLKRAISFFY

SEQ ID NO: 181 - protein, 10 aa, Artificial Sequence
  Synthetic peptide
RAISFFYQTY

SEQ ID NO: 182 - protein, 9 aa, Artificial Sequence
  Synthetic peptide
AISFFYQTY

SEQ ID NO: 183 - protein, 9 aa, Artificial Sequence
  Synthetic peptide
YQTYGHLSM

SEQ ID NO: 184 - protein, 9 aa, Artificial Sequence
  Synthetic peptide
QTYGHLSMW

SEQ ID NO: 185 - protein, 10 aa, Artificial Sequence
  Synthetic peptide
MMQLACMKDY

SEQ ID NO: 186 - protein, 10 aa, Artificial Sequence
  Synthetic peptide
SMVDCCHKNY

SEQ ID NO: 187 - protein, 9 aa, Artificial Sequence
  Synthetic peptide
LLSDNPLFL

SEQ ID NO: 188 - protein, 10 aa, Artificial Sequence
  Synthetic peptide
TLDNISFNEM

SEQ ID NO: 189 - protein, 11 aa, Artificial Sequence
  Synthetic peptide
TLDNISFNEML

SEQ ID NO: 190 - protein, 9 aa, Artificial Sequence
  Synthetic peptide
DNISFNEML

SEQ ID NO: 191 - protein, 10 aa, Artificial Sequence
  Synthetic peptide
ISFNEMLTRY

SEQ ID NO: 192 - protein, 9 aa, Artificial Sequence
  Synthetic peptide
ISFNEMLTR

SEQ ID NO: 193 - protein, 11 aa, Artificial Sequence
  Synthetic peptide
ISFNEMLTRYW

SEQ ID NO: 194 - protein, 9 aa, Artificial Sequence
  Synthetic peptide
SFNEMLTRY

SEQ ID NO: 195 - protein, 11 aa, Artificial Sequence
  Synthetic peptide
SFNEMLTRYWY

SEQ ID NO: 196 - protein, 10 aa, Artificial Sequence
  Synthetic peptide
SFNEMLTRYW

SEQ ID NO: 197 - protein, 10 aa, Artificial Sequence
  Synthetic peptide
FNEMLTRYWY

SEQ ID NO: 198 - protein, 9 aa, Artificial Sequence
  Synthetic peptide
FNEMLTRYW

SEQ ID NO: 199 - protein, 9 aa, Artificial Sequence
  Synthetic peptide
NEMLTRYWY

SEQ ID NO: 200 - protein, 11 aa, Artificial Sequence
  Synthetic peptide
NEMLTRYWYSM

SEQ ID NO: 201 - protein, 8 aa, Artificial Sequence
  Synthetic peptide
NEMLTRYW

SEQ ID NO: 202 - protein, 10 aa, Artificial Sequence
  Synthetic peptide
EMLTRYWYSM

SEQ ID NO: 203 - protein, 9 aa, Artificial Sequence
  Synthetic peptide
EMLTRYWYS

SEQ ID NO: 204 - protein, 9 aa, Artificial Sequence
  Synthetic peptide
MLTRYWYSM

SEQ ID NO: 205 - protein, 11 aa, Artificial Sequence
  Synthetic peptide
MLTRYWYSMAI

SEQ ID NO: 206 - protein, 10 aa, Artificial Sequence
  Synthetic peptide
LTRYWYSMAI

SEQ ID NO: 207 - protein, 8 aa, Artificial Sequence
  Synthetic peptide
LTRYWYSM

SEQ ID NO: 208 - protein, 9 aa, Artificial Sequence
  Synthetic peptide
TRYWYSMAI

SEQ ID NO: 209 - protein, 10 aa, Artificial Sequence
  Synthetic peptide
TRYWYSMAIL

SEQ ID NO: 210 - protein, 11 aa, Artificial Sequence
  Synthetic peptide
TRYWYSMAILY

SEQ ID NO: 211 - protein, 9 aa, Artificial Sequence
  Synthetic peptide
RYWYSMAIL

SEQ ID NO: 212 - protein, 10 aa, Artificial Sequence
  Synthetic peptide
RYWYSMAILY

SEQ ID NO: 213 - protein, 11 aa, Artificial Sequence
  Synthetic peptide
RYWYSMAILYK

SEQ ID NO: 214 - protein, 8 aa, Artificial Sequence
  Synthetic peptide
RYWYSMAI

SEQ ID NO: 215 - protein, 9 aa, Artificial Sequence
  Synthetic peptide
YWYSMAILY

SEQ ID NO: 216 - protein, 10 aa, Artificial Sequence
  Synthetic peptide
YWYSMAILYK

SEQ ID NO: 217 - protein, 11 aa, Artificial Sequence
  Synthetic peptide
YWYSMAILYKL

SEQ ID NO: 218 - protein, 10 aa, Artificial Sequence
  Synthetic peptide
WYSMAILYKL

SEQ ID NO: 219 - protein, 9 aa, Artificial Sequence
  Synthetic peptide
WYSMAILYK

SEQ ID NO: 220 - protein, 9 aa, Artificial Sequence
  Synthetic peptide
YSMAILYKL

SEQ ID NO: 221 - protein, 8 aa, Artificial Sequence
  Synthetic peptide
YSMAILYK

SEQ ID NO: 222 - protein, 11 aa, Artificial Sequence
  Synthetic peptide
MAILYKLTEAI

SEQ ID NO: 223 - protein, 10 aa, Artificial Sequence
  Synthetic peptide
AILYKLTEAI

SEQ ID NO: 224 - protein, 9 aa, Artificial Sequence
  Synthetic peptide
ILYKLTEAI

SEQ ID NO: 225 - protein, 11 aa, Artificial Sequence
  Synthetic peptide
ILYKLTEAIQY

SEQ ID NO: 226 - protein, 11 aa, Artificial Sequence
  Synthetic peptide
YKLTEAIQYFY

SEQ ID NO: 227 - protein, 10 aa, Artificial Sequence
  Synthetic peptide
YKLTEAIQYF

SEQ ID NO: 228 - protein, 9 aa, Artificial Sequence
  Synthetic peptide
KLTEAIQYF

SEQ ID NO: 229 - protein, 9 aa, Artificial Sequence
  Synthetic peptide
VAYNNVFDL

SEQ ID NO: 230 - protein, 9 aa, Artificial Sequence
  Synthetic peptide
AMITSVMNF

SEQ ID NO: 231 - protein, 9 aa, Artificial Sequence
  Synthetic peptide
ASQTNNWIL

SEQ ID NO: 232 - protein, 9 aa, Artificial Sequence
  Synthetic peptide
AARQQIAVY

SEQ ID NO: 233 - protein, 9 aa, Artificial Sequence
  Synthetic peptide
MAATYKLQL

SEQ ID NO: 234 - protein, 10 aa, Artificial Sequence
  Synthetic peptide
QLMGCNTATY

SEQ ID NO: 235 - protein, 9 aa, Artificial Sequence
  Synthetic peptide
KTLPSIQNL

SEQ ID NO: 236 - protein, 9 aa, Artificial Sequence
  Synthetic peptide
SVYEKKFFL

SEQ ID NO: 237 - protein, 10 aa, Artificial Sequence
  Synthetic peptide
KVFLGLLLGY

SEQ ID NO: 238 - protein, 11 aa, Artificial Sequence
  Synthetic peptide
YQSPTTPWCFY

SEQ ID NO: 239 - protein, 9 aa, Artificial Sequence
  Synthetic peptide
RLYEHEMFM

SEQ ID NO: 240 - protein, 9 aa, Artificial Sequence
  Synthetic peptide
TTMKLLMLL

SEQ ID NO: 241 - protein, 9 aa, Artificial Sequence
  Synthetic peptide
MVYNFNTLY

SEQ ID NO: 242 - protein, 9 aa, Artificial Sequence
  Synthetic peptide
MNFFCNIKL

SEQ ID NO: 243 - protein, 9 aa, Artificial Sequence
  Synthetic peptide
FTDAGGNNF

SEQ ID NO: 244 - protein, 9 aa, Artificial Sequence
  Synthetic peptide
YSFGTSLEM

SEQ ID NO: 245 - protein, 10 aa, Artificial Sequence
  Synthetic peptide
MIQATMITMY

SEQ ID NO: 246 - protein, 9 aa, Artificial Sequence
  Synthetic peptide
NEYWAIHLF

SEQ ID NO: 247 - protein, 9 aa, Artificial Sequence
  Synthetic peptide
KSQFWNYTM

SEQ ID NO: 248 - protein, 10 aa, Artificial Sequence
  Synthetic peptide
YHQKKIWTPY

SEQ ID NO: 249 - protein, 9 aa, Artificial Sequence
  Synthetic peptide
ILSEMFTKY

SEQ ID NO: 250 - protein, 9 aa, Artificial Sequence
  Synthetic peptide
YAHLHRWRL

SEQ ID NO: 251 - protein, 9 aa, Artificial Sequence
  Synthetic peptide
INQAMFHSI

SEQ ID NO: 252 - protein, 9 aa, Artificial Sequence
  Synthetic peptide
QAMFHSIQF

SEQ ID NO: 253 - protein, 10 aa, Artificial Sequence
  Synthetic peptide
QAMFHSIQFY

SEQ ID NO: 254 - protein, 9 aa, Artificial Sequence
  Synthetic peptide
AMFHSIQFY

SEQ ID NO: 255 - protein, 9 aa, Artificial Sequence
  Synthetic peptide
ASMLSLNCY

SEQ ID NO: 256 - protein, 9 aa, Artificial Sequence
  Synthetic peptide
AISYVYQHF

SEQ ID NO: 257 - protein, 9 aa, Artificial Sequence
  Synthetic peptide
KLFDLHNLY

SEQ ID NO: 258 - protein, 10 aa, Artificial Sequence
  Synthetic peptide
SAMLACVRFY

SEQ ID NO: 259 - protein, 9 aa, Artificial Sequence
  Synthetic peptide
AMLACVRFY

SEQ ID NO: 260 - protein, 10 aa, Artificial Sequence
  Synthetic peptide
KALAEQRNYY

SEQ ID NO: 261 - protein, 9 aa, Artificial Sequence
  Synthetic peptide
ALAEQRNYY

SEQ ID NO: 262 - protein, 9 aa, Artificial Sequence
  Synthetic peptide
SADSSLLTL

SEQ ID NO: 263 - protein, 9 aa, Artificial Sequence
  Synthetic peptide
NVFDLHELY

SEQ ID NO: 264 - protein, 10 aa, Artificial Sequence
  Synthetic peptide
MMHIACIQDY

SEQ ID NO: 265 - protein, 10 aa, Artificial Sequence
  Synthetic peptide
YSYSAIYYCF

SEQ ID NO: 266 - protein, 9 aa, Artificial Sequence
  Synthetic peptide
SYSAIYYCF

SEQ ID NO: 267 - protein, 9 aa, Artificial Sequence
  Synthetic peptide
MGANINQAM

SEQ ID NO: 268 - protein, 10 aa, Artificial Sequence
  Synthetic peptide
SINMGIFLDY

SEQ ID NO: 269 - protein, 9 aa, Artificial Sequence
  Synthetic peptide
KLPEFFDEY

SEQ ID NO: 270 - protein, 9 aa, Artificial Sequence
  Synthetic peptide
LAWEGNLYY

SEQ ID NO: 271 - protein, 9 aa, Artificial Sequence
  Synthetic peptide
YSKFRVLLY

SEQ ID NO: 272 - protein, 9 aa, Artificial Sequence
  Synthetic peptide
WIYENLHIY

SEQ ID NO: 273 - protein, 9 aa, Artificial Sequence
  Synthetic peptide
HIYNMIDTF

SEQ ID NO: 274 - protein, 9 aa, Artificial Sequence
  Synthetic peptide
RMLSSLQLL

SEQ ID NO: 275 - protein, 11 aa, Artificial Sequence
  Synthetic peptide
ATYNHRKILIY

SEQ ID NO: 276 - protein, 9 aa, Artificial Sequence
  Synthetic peptide
KISHYVATY

SEQ ID NO: 277 - protein, 9 aa, Artificial Sequence
  Synthetic peptide
ITFDHNLRL

SEQ ID NO: 278 - protein, 9 aa, Artificial Sequence
  Synthetic peptide
MRIEIFWEL

SEQ ID NO: 279 - protein, 9 aa, Artificial Sequence
  Synthetic peptide
KTDLLNNEF

SEQ ID NO: 280 - protein, 9 aa, Artificial Sequence
  Synthetic peptide
SLSTLLLKY

SEQ ID NO: 281 - protein, 9 aa, Artificial Sequence
  Synthetic peptide
YAIAIRYNL

SEQ ID NO: 282 - protein, 10 aa, Artificial Sequence
  Synthetic peptide
NLKEAIQYFY

SEQ ID NO: 283 - protein, 9 aa, Artificial Sequence
  Synthetic peptide
YTHLNTWRL

SEQ ID NO: 284 - protein, 9 aa, Artificial Sequence
  Synthetic peptide
NVFDLHEAY

SEQ ID NO: 285 - protein, 10 aa, Artificial Sequence
  Synthetic peptide
QAMLSSIQYY

SEQ ID NO: 286 - protein, 9 aa, Artificial Sequence
  Synthetic peptide
AMLSSIQYY

SEQ ID NO: 287 - protein, 9 aa, Artificial Sequence
  Synthetic peptide
SLIKLFTEW

SEQ ID NO: 288 - protein, 9 aa, Artificial Sequence
  Synthetic peptide
YTDLNEWRL

SEQ ID NO: 289 - protein, 9 aa, Artificial Sequence
  Synthetic peptide
KIYELHEMY

SEQ ID NO: 290 - protein, 9 aa, Artificial Sequence
  Synthetic peptide
AMLTSVQYY

SEQ ID NO: 291 - protein, 9 aa, Artificial Sequence
  Synthetic peptide
YSSDASLPL

SEQ ID NO: 292 - protein, 9 aa, Artificial Sequence
  Synthetic peptide
YTLQRFGLW

SEQ ID NO: 293 - protein, 9 aa, Artificial Sequence
  Synthetic peptide
FSYKHLQCF

SEQ ID NO: 294 - protein, 10 aa, Artificial Sequence
  Synthetic peptide
KSCAGVLLGY

SEQ ID NO: 295 - protein, 10 aa, Artificial Sequence
  Synthetic peptide
ALRHNFTKAI

SEQ ID NO: 296 - protein, 9 aa, Artificial Sequence
  Synthetic peptide
LRHNFTKAI

SEQ ID NO: 297 - protein, 11 aa, Artificial Sequence
  Synthetic peptide
LRHNFTKAIHY

SEQ ID NO: 298 - protein, 10 aa, Artificial Sequence
  Synthetic peptide
RHNFTKAIHY

SEQ ID NO: 299 - protein, 11 aa, Artificial Sequence
  Synthetic peptide
RHNFTKAIHYF

SEQ ID NO: 300 - protein, 9 aa, Artificial Sequence
  Synthetic peptide
RHNFTKAIH

SEQ ID NO: 301 - protein, 11 aa, Artificial Sequence
  Synthetic peptide
HNFTKAIHYFY

SEQ ID NO: 302 - protein, 10 aa, Artificial Sequence
  Synthetic peptide
HNFTKAIHYF

SEQ ID NO: 303 - protein, 9 aa, Artificial Sequence
  Synthetic peptide
HNFTKAIHY

SEQ ID NO: 304 - protein, 10 aa, Artificial Sequence
  Synthetic peptide
NFTKAIHYFY

SEQ ID NO: 305 - protein, 11 aa, Artificial Sequence
  Synthetic peptide
NFTKAIHYFYK

SEQ ID NO: 306 - protein, 9 aa, Artificial Sequence
  Synthetic peptide
NFTKAIHYF

SEQ ID NO: 307 - protein, 9 aa, Artificial Sequence
  Synthetic peptide
FTKAIHYFY

SEQ ID NO: 308 - protein, 10 aa, Artificial Sequence
  Synthetic peptide
FTKAIHYFYK

SEQ ID NO: 309 - protein, 11 aa, Artificial Sequence
  Synthetic peptide
FTKAIHYFYKR

SEQ ID NO: 310 - protein, 9 aa, Artificial Sequence
  Synthetic peptide
TKAIHYFYK

SEQ ID NO: 311 - protein, 10 aa, Artificial Sequence
  Synthetic peptide
TKAIHYFYKR

SEQ ID NO: 312 - protein, 9 aa, Artificial Sequence
  Synthetic peptide
KAIHYFYKR

SEQ ID NO: 313 - protein, 8 aa, Artificial Sequence
  Synthetic peptide
KAIHYFYK

SEQ ID NO: 314 - protein, 11 aa, Artificial Sequence
  Synthetic peptide
KAIHYFYKRHK

SEQ ID NO: 315 - protein, 11 aa, Artificial Sequence
  Synthetic peptide
YFYKRHKNHLY

SEQ ID NO: 316 - protein, 10 aa, Artificial Sequence
  Synthetic peptide
YFYKRHKNHL

SEQ ID NO: 317 - protein, 10 aa, Artificial Sequence
  Synthetic peptide
YKRHKNHLYW

SEQ ID NO: 318 - protein, 9 aa, Artificial Sequence
  Synthetic peptide
YKRHKNHLY

SEQ ID NO: 319 - protein, 9 aa, Artificial Sequence
  Synthetic peptide
KRHKNHLYW

SEQ ID NO: 320 - protein, 11 aa, Artificial Sequence
  Synthetic peptide
KRHKNHLYWRV

SEQ ID NO: 321 - protein, 8 aa, Artificial Sequence
  Synthetic peptide
KRHKNHLY

SEQ ID NO: 322 - protein, 10 aa, Artificial Sequence
  Synthetic peptide
KRHKNHLYWR

SEQ ID NO: 323 - protein, 10 aa, Artificial Sequence
  Synthetic peptide
RHKNHLYWRV

SEQ ID NO: 324 - protein, 9 aa, Artificial Sequence
  Synthetic peptide
RHKNHLYWR

SEQ ID NO: 325 - protein, 8 aa, Artificial Sequence
  Synthetic peptide
RHKNHLYW

SEQ ID NO: 326 - protein, 9 aa, Artificial Sequence
  Synthetic peptide
HKNHLYWRV

SEQ ID NO: 327 - protein, 9 aa, Artificial Sequence
  Synthetic peptide
KNHLYWRVA

SEQ ID NO: 328 - protein, 8 aa, Artificial Sequence
  Synthetic peptide
KNHLYWRV

SEQ ID NO: 329 - protein, 9 aa, Artificial Sequence
  Synthetic peptide
ASLDYGMNL

SEQ ID NO: 330 - protein, 9 aa, Artificial Sequence
  Synthetic peptide
NNNTLNMFF

SEQ ID NO: 331 - protein, 9 aa, Artificial Sequence
  Synthetic peptide
YMYNLSNIF

SEQ ID NO: 332 - protein, 9 aa, Artificial Sequence
  Synthetic peptide
HVLQRLGLY

SEQ ID NO: 333 - protein, 10 aa, Artificial Sequence
  Synthetic peptide
MRAYLHETLF

SEQ ID NO: 334 - protein, 9 aa, Artificial Sequence
  Synthetic peptide
RAYLHETLF

SEQ ID NO: 335 - protein, 9 aa, Artificial Sequence
  Synthetic peptide
YLHETLFEL

SEQ ID NO: 336 - protein, 9 aa, Artificial Sequence
  Synthetic peptide
TMYSLGYIF

SEQ ID NO: 337 - protein, 9 aa, Artificial Sequence
  Synthetic peptide
YSLGYIFLF

SEQ ID NO: 338 - protein, 9 aa, Artificial Sequence
  Synthetic peptide
AMLEKMVRY

SEQ ID NO: 339 - protein, 10 aa, Artificial Sequence
  Synthetic peptide
RTDIVIHTSY

SEQ ID NO: 340 - protein, 10 aa, Artificial Sequence
  Synthetic peptide
RLTRLKNMVY

SEQ ID NO: 341 - protein, 10 aa, Artificial Sequence
  Synthetic peptide
KVMFYLAKLY

SEQ ID NO: 342 - protein, 9 aa, Artificial Sequence
  Synthetic peptide
VMFYLAKLY

SEQ ID NO: 343 - protein, 9 aa, Artificial Sequence
  Synthetic peptide
FFDDYVLQL

SEQ ID NO: 344 - protein, 9 aa, Artificial Sequence
  Synthetic peptide
STCSLKCLF

SEQ ID NO: 345 - protein, 9 aa, Artificial Sequence
  Synthetic peptide
WEYCSQMLF

SEQ ID NO: 346 - protein, 9 aa, Artificial Sequence
  Synthetic peptide
VSIKGLLPF

SEQ ID NO: 347 - protein, 9 aa, Artificial Sequence
  Synthetic peptide
YQHKHILKY

SEQ ID NO: 348 - protein, 9 aa, Artificial Sequence
  Synthetic peptide
YILQALGLY

SEQ ID NO: 349 - protein, 9 aa, Artificial Sequence
  Synthetic peptide
RVIKLLLSW

SEQ ID NO: 350 - protein, 9 aa, Artificial Sequence
  Synthetic peptide
LSWEGNFHY

SEQ ID NO: 351 - protein, 9 aa, Artificial Sequence
  Synthetic peptide
SLIQNANTF

SEQ ID NO: 352 - protein, 9 aa, Artificial Sequence
  Synthetic peptide
SNSNMWCLI

SEQ ID NO: 353 - protein, 9 aa, Artificial Sequence
  Synthetic peptide
MLNEPEFIF

SEQ ID NO: 354 - protein, 9 aa, Artificial Sequence
  Synthetic peptide
LTMGYSLLF

SEQ ID NO: 355 - protein, 9 aa, Artificial Sequence
  Synthetic peptide
KAATKGCFF

SEQ ID NO: 356 - protein, 9 aa, Artificial Sequence
  Synthetic peptide
AVLSKAVEY

SEQ ID NO: 357 - protein, 9 aa, Artificial Sequence
  Synthetic peptide
YSYCFIKHF

SEQ ID NO: 358 - protein, 9 aa, Artificial Sequence
  Synthetic peptide
HVIQRLGLY

SEQ ID NO: 359 - protein, 9 aa, Artificial Sequence
  Synthetic peptide
LSIGYTLLF

SEQ ID NO: 360 - protein, 9 aa, Artificial Sequence
  Synthetic peptide
AGMGLLHFM

SEQ ID NO: 361 - protein, 10 aa, Artificial Sequence
  Synthetic peptide
KKTLNLLLSY

SEQ ID NO: 362 - protein, 9 aa, Artificial Sequence
  Synthetic peptide
FIGYHSYTY

SEQ ID NO: 363 - protein, 9 aa, Artificial Sequence
  Synthetic peptide
HSYTYMVDF

SEQ ID NO: 364 - protein, 9 aa, Artificial Sequence
  Synthetic peptide
YMVDFMREF

SEQ ID NO: 365 - protein, 10 aa, Artificial Sequence
  Synthetic peptide
RLHYLKSLVY

SEQ ID NO: 366 - protein, 10 aa, Artificial Sequence
  Synthetic peptide
KEMFNLARFY

SEQ ID NO: 367 - protein, 9 aa, Artificial Sequence
  Synthetic peptide
EMFNLARFY

SEQ ID NO: 368 - protein, 9 aa, Artificial Sequence
  Synthetic peptide
KTIETDMRY

SEQ ID NO: 369 - protein, 10 aa, Artificial Sequence
  Synthetic peptide
KHTLQWLGLY

SEQ ID NO: 370 - protein, 9 aa, Artificial Sequence
  Synthetic peptide
HTLQWLGLY

SEQ ID NO: 371 - protein, 9 aa, Artificial Sequence
  Synthetic peptide
QIQDWHILL

SEQ ID NO: 372 - protein, 10 aa, Artificial Sequence
  Synthetic peptide
MAIDNGLLPF

SEQ ID NO: 373 - protein, 9 aa, Artificial Sequence
  Synthetic peptide
NTIERLLYL

SEQ ID NO: 374 - protein, 9 aa, Artificial Sequence
  Synthetic peptide
STYFQVREF

SEQ ID NO: 375 - protein, 9 aa, Artificial Sequence
  Synthetic peptide
QVREFIQEF

SEQ ID NO: 376 - protein, 9 aa, Artificial Sequence
  Synthetic peptide
KQIVHTIKY

SEQ ID NO: 377 - protein, 10 aa, Artificial Sequence
  Synthetic peptide
KNTFFLPSDF

SEQ ID NO: 378 - protein, 9 aa, Artificial Sequence
  Synthetic peptide
NTFFLPSDF

SEQ ID NO: 379 - protein, 10 aa, Artificial Sequence
  Synthetic peptide
KHTLHLLGLY

SEQ ID NO: 380 - protein, 9 aa, Artificial Sequence
  Synthetic peptide
KHTLHLLGL

SEQ ID NO: 381 - protein, 9 aa, Artificial Sequence
  Synthetic peptide
HTLHLLGLY

SEQ ID NO: 382 - protein, 10 aa, Artificial Sequence
  Synthetic peptide
HTLHLLGLYW

SEQ ID NO: 383 - protein, 9 aa, Artificial Sequence
  Synthetic peptide
LTLSINEAL

SEQ ID NO: 384 - protein, 10 aa, Artificial Sequence
  Synthetic peptide
LLLWEGNLHY

SEQ ID NO: 385 - protein, 9 aa, Artificial Sequence
  Synthetic peptide
LLWEGNLHY

SEQ ID NO: 386 - protein, 11 aa, Artificial Sequence
  Synthetic peptide
RTENYNLVCEY

SEQ ID NO: 387 - protein, 10 aa, Artificial Sequence
  Synthetic peptide
HSQIQDWHVL

SEQ ID NO: 388 - protein, 9 aa, Artificial Sequence
  Synthetic peptide
SQIQDWHVL

SEQ ID NO: 389 - protein, 10 aa, Artificial Sequence
  Synthetic peptide
SQIQDWHVLL

SEQ ID NO: 390 - protein, 9 aa, Artificial Sequence
  Synthetic peptide
QIQDWHVLL

SEQ ID NO: 391 - protein, 10 aa, Artificial Sequence
  Synthetic peptide
SCLLQHAVKY

SEQ ID NO: 392 - protein, 9 aa, Artificial Sequence
  Synthetic peptide
CLLQHAVKY

SEQ ID NO: 393 - protein, 10 aa, Artificial Sequence
  Synthetic peptide
KYNMLSILVK

SEQ ID NO: 394 - protein, 10 aa, Artificial Sequence
  Synthetic peptide
YNMLSILVKY

SEQ ID NO: 395 - protein, 9 aa, Artificial Sequence
  Synthetic peptide
NMLSILVKY

SEQ ID NO: 396 - protein, 9 aa, Artificial Sequence
  Synthetic peptide
FRQQIQGLF

SEQ ID NO: 397 - protein, 9 aa, Artificial Sequence
  Synthetic peptide
RQQIQGLFI

SEQ ID NO: 398 - protein, 10 aa, Artificial Sequence
  Synthetic peptide
RQQIQGLFIL

SEQ ID NO: 399 - protein, 9 aa, Artificial Sequence
  Synthetic peptide
QQIQGLFIL

SEQ ID NO: 400 - protein, 9 aa, Artificial Sequence
  Synthetic peptide
NRKLEILTW

SEQ ID NO: 401 - protein, 9 aa, Artificial Sequence
  Synthetic peptide
RKLEILTWM

SEQ ID NO: 402 - protein, 9 aa, Artificial Sequence
  Synthetic peptide
AVVTKDLEM

SEQ ID NO: 403 - protein, 10 aa, Artificial Sequence
  Synthetic peptide
KDLEMFSLGY

SEQ ID NO: 404 - protein, 9 aa, Artificial Sequence
  Synthetic peptide
DLEMFSLGY

SEQ ID NO: 405 - protein, 9 aa, Artificial Sequence
  Synthetic peptide
EMFSLGYKI

SEQ ID NO: 406 - protein, 10 aa, Artificial Sequence
  Synthetic peptide
SLGYKIVFEY

SEQ ID NO: 407 - protein, 9 aa, Artificial Sequence
  Synthetic peptide
LGYKIVFEY

SEQ ID NO: 408 - protein, 9 aa, Artificial Sequence
  Synthetic peptide
YMENQGLHL

SEQ ID NO: 409 - protein, 10 aa, Artificial Sequence
  Synthetic peptide
VRMVMLNHHF

SEQ ID NO: 410 - protein, 9 aa, Artificial Sequence
  Synthetic peptide
RMVMLNHHF

SEQ ID NO: 411 - protein, 11 aa, Artificial Sequence
  Synthetic peptide
RMVMLNHHFGM

SEQ ID NO: 412 - protein, 10 aa, Artificial Sequence
  Synthetic peptide
MVMLNHHFGM

SEQ ID NO: 413 - protein, 9 aa, Artificial Sequence
  Synthetic peptide
VMLNHHFGM

SEQ ID NO: 414 - protein, 10 aa, Artificial Sequence
  Synthetic peptide
MVINKGLLPF

SEQ ID NO: 415 - protein, 9 aa, Artificial Sequence
  Synthetic peptide
VINKGLLPF

SEQ ID NO: 416 - protein, 10 aa, Artificial Sequence
  Synthetic peptide
KGLLPFVLEI

SEQ ID NO: 417 - protein, 8 aa, Artificial Sequence
  Synthetic peptide
KGLLPFVL

SEQ ID NO: 418 - protein, 10 aa, Artificial Sequence
  Synthetic peptide
GGNVNRALSY

SEQ ID NO: 419 - protein, 9 aa, Artificial Sequence
  Synthetic peptide
GNVNRALSY

SEQ ID NO: 420 - protein, 9 aa, Artificial Sequence
  Synthetic peptide
VNRALSYAV

SEQ ID NO: 421 - protein, 9 aa, Artificial Sequence
  Synthetic peptide
KRKILDHVV

SEQ ID NO: 422 - protein, 9 aa, Artificial Sequence
  Synthetic peptide
KTIERMLHL

SEQ ID NO: 423 - protein, 10 aa, Artificial Sequence
  Synthetic peptide
KHAPRKTLNL

SEQ ID NO: 424 - protein, 10 aa, Artificial Sequence
  Synthetic peptide
APRKTLNLLL

SEQ ID NO: 425 - protein, 10 aa, Artificial Sequence
  Synthetic peptide
RKTLNLLLSY

SEQ ID NO: 426 - protein, 9 aa, Artificial Sequence
  Synthetic peptide
KTLNLLLSY

SEQ ID NO: 427 - protein, 10 aa, Artificial Sequence
  Synthetic peptide
KTLNLLLSYI

SEQ ID NO: 428 - protein, 9 aa, Artificial Sequence
  Synthetic peptide
KLLEHVVKY

SEQ ID NO: 429 - protein, 9 aa, Artificial Sequence
  Synthetic peptide
YNSTLVIRL

SEQ ID NO: 430 - protein, 9 aa, Artificial Sequence
  Synthetic peptide
STLVIRLLL

SEQ ID NO: 431 - protein, 9 aa, Artificial Sequence
  Synthetic peptide
KKNLLDATL

SEQ ID NO: 432 - protein, 11 aa, Artificial Sequence
  Synthetic peptide
KNLLDATLTRY

SEQ ID NO: 433 - protein, 10 aa, Artificial Sequence
  Synthetic peptide
NLLDATLTRY

SEQ ID NO: 434 - protein, 9 aa, Artificial Sequence
  Synthetic peptide
LLDATLTRY

SEQ ID NO: 435 - protein, 9 aa, Artificial Sequence
  Synthetic peptide
TRYVKDSTY

SEQ ID NO: 436 - protein, 9 aa, Artificial Sequence
  Synthetic peptide
STYFQVKEF

SEQ ID NO: 437 - protein, 9 aa, Artificial Sequence
  Synthetic peptide
QVKEFMQDF

SEQ ID NO: 438 - protein, 11 aa, Artificial Sequence
  Synthetic peptide
MQDFSISPEKF

SEQ ID NO: 439 - protein, 9 aa, Artificial Sequence
  Synthetic peptide
ISPEKFIKI

SEQ ID NO: 440 - protein, 9 aa, Artificial Sequence
  Synthetic peptide
KRNVLIKGI

SEQ ID NO: 441 - protein, 10 aa, Artificial Sequence
  Synthetic peptide
RNLKQIVCTI

SEQ ID NO: 442 - protein, 9 aa, Artificial Sequence
  Synthetic peptide
YESGRQFLI

SEQ ID NO: 443 - protein, 9 aa, Artificial Sequence
  Synthetic peptide
SGRQFLINI

SEQ ID NO: 444 - protein, 9 aa, Artificial Sequence
  Synthetic peptide
FLINIIHTI

SEQ ID NO: 445 - protein, 10 aa, Artificial Sequence
  Synthetic peptide
FLINIIHTIY

SEQ ID NO: 446 - protein, 9 aa, Artificial Sequence
  Synthetic peptide
LINIIHTIY

SEQ ID NO: 447 - protein, 10 aa, Artificial Sequence
  Synthetic peptide
NIIHTIYQSY

SEQ ID NO: 448 - protein, 9 aa, Artificial Sequence
  Synthetic peptide
IIHTIYQSY

SEQ ID NO: 449 - protein, 9 aa, Artificial Sequence
  Synthetic peptide
HTIYQSYSL

SEQ ID NO: 450 - protein, 9 aa, Artificial Sequence
  Synthetic peptide
EILKLATFY

SEQ ID NO: 451 - protein, 10 aa, Artificial Sequence
  Synthetic peptide
YVKHNATTHF

SEQ ID NO: 452 - protein, 9 aa, Artificial Sequence
  Synthetic peptide
KHNATTHFK

SEQ ID NO: 453 - protein, 10 aa, Artificial Sequence
  Synthetic peptide
RRTESKKLFL

SEQ ID NO: 454 - protein, 9 aa, Artificial Sequence
  Synthetic peptide
RTESKKLFL

SEQ ID NO: 455 - protein, 10 aa, Artificial Sequence
  Synthetic peptide
KSIVSEYINY

SEQ ID NO: 456 - protein, 9 aa, Artificial Sequence
  Synthetic peptide
SIVSEYINY

SEQ ID NO: 457 - protein, 9 aa, Artificial Sequence
  Synthetic peptide
IVSEYINYL

SEQ ID NO: 458 - protein, 10 aa, Artificial Sequence
  Synthetic peptide
IVSEYINYLF

SEQ ID NO: 459 - protein, 9 aa, Artificial Sequence
  Synthetic peptide
VSEYINYLF

SEQ ID NO: 460 - protein, 10 aa, Artificial Sequence
  Synthetic peptide
ITKEEIMQAY

SEQ ID NO: 461 - protein, 9 aa, Artificial Sequence
  Synthetic peptide
EEIMQAYAL

SEQ ID NO: 462 - protein, 10 aa, Artificial Sequence
  Synthetic peptide
EIMQAYALEY

SEQ ID NO: 463 - protein, 9 aa, Artificial Sequence
  Synthetic peptide
IMQAYALEY

SEQ ID NO: 464 - protein, 10 aa, Artificial Sequence
  Synthetic peptide
MQAYALEYAM

SEQ ID NO: 465 - protein, 11 aa, Artificial Sequence
  Synthetic peptide
MQAYALEYAMY

SEQ ID NO: 466 - protein, 8 aa, Artificial Sequence
  Synthetic peptide
MQAYALEY

SEQ ID NO: 467 - protein, 9 aa, Artificial Sequence
  Synthetic peptide
QAYALEYAM

SEQ ID NO: 468 - protein, 10 aa, Artificial Sequence
  Synthetic peptide
QAYALEYAMY

SEQ ID NO: 469 - protein, 9 aa, Artificial Sequence
  Synthetic peptide
HVVQRLGLY

SEQ ID NO: 470 - protein, 9 aa, Artificial Sequence
  Synthetic peptide
RQYDLIQKY

SEQ ID NO: 471 - protein, 10 aa, Artificial Sequence
  Synthetic peptide
RQYDLIQKYY

SEQ ID NO: 472 - protein, 9 aa, Artificial Sequence
  Synthetic peptide
VTCTFQCLF

SEQ ID NO: 473 - protein, 9 aa, Artificial Sequence
  Synthetic peptide
YSLGYMLLL

SEQ ID NO: 474 - protein, 10 aa, Artificial Sequence
  Synthetic peptide
ISIITRHLEY

SEQ ID NO: 475 - protein, 9 aa, Artificial Sequence
  Synthetic peptide
SIITRHLEY

SEQ ID NO: 476 - protein, 10 aa, Artificial Sequence
  Synthetic peptide
SSINYCVNPF

SEQ ID NO: 477 - protein, 9 aa, Artificial Sequence
  Synthetic peptide
SINYCVNPF

SEQ ID NO: 478 - protein, 9 aa, Artificial Sequence
  Synthetic peptide
STYTEIVKY

SEQ ID NO: 479 - protein, 9 aa, Artificial Sequence
  Synthetic peptide
HNITGYTYL

SEQ ID NO: 480 - protein, 10 aa, Artificial Sequence
  Synthetic peptide
KEAFNLTRFY

SEQ ID NO: 481 - protein, 10 aa, Artificial Sequence
  Synthetic peptide
YAVHNATCLF

SEQ ID NO: 482 - protein, 9 aa, Artificial Sequence
  Synthetic peptide
AVHNATCLF

SEQ ID NO: 483 - protein, 9 aa, Artificial Sequence
  Synthetic peptide
EQIRLHMAL

SEQ ID NO: 484 - protein, 9 aa, Artificial Sequence
  Synthetic peptide
HMALTQILF

SEQ ID NO: 485 - protein, 9 aa, Artificial Sequence
  Synthetic peptide
FAHKNLSLY

SEQ ID NO: 486 - protein, 9 aa, Artificial Sequence
  Synthetic peptide
RTAAAGGLL

SEQ ID NO: 487 - protein, 9 aa, Artificial Sequence
  Synthetic peptide
AAAGGLLNF

SEQ ID NO: 488 - protein, 9 aa, Artificial Sequence
  Synthetic peptide
KTVKKLLLY

SEQ ID NO: 489 - protein, 9 aa, Artificial Sequence
  Synthetic peptide
AVLARLVKY

SEQ ID NO: 490 - protein, 9 aa, Artificial Sequence
  Synthetic peptide
STYTDIVQF

SEQ ID NO: 491 - protein, 9 aa, Artificial Sequence
  Synthetic peptide
MAARESRTF

SEQ ID NO: 492 - protein, 9 aa, Artificial Sequence
  Synthetic peptide
IVDDYIRFL

SEQ ID NO: 493 - protein, 10 aa, Artificial Sequence
  Synthetic peptide
IVDDYIRFLF

SEQ ID NO: 494 - protein, 9 aa, Artificial Sequence
  Synthetic peptide
NTIDPYISL

SEQ ID NO: 495 - protein, 9 aa, Artificial Sequence
  Synthetic peptide
TIDPYISLR

SEQ ID NO: 496 - protein, 10 aa, Artificial Sequence
  Synthetic peptide
TIDPYISLRL

SEQ ID NO: 497 - protein, 9 aa, Artificial Sequence
  Synthetic peptide
ISLRLFEVK

SEQ ID NO: 498 - protein, 9 aa, Artificial Sequence
  Synthetic peptide
RLFEVKPKY

SEQ ID NO: 499 - protein, 10 aa, Artificial Sequence
  Synthetic peptide
SSIDARNQSF

SEQ ID NO: 500 - protein, 9 aa, Artificial Sequence
  Synthetic peptide
SIDARNQSF

SEQ ID NO: 501 - protein, 9 aa, Artificial Sequence
  Synthetic peptide
NQSFAIHDI

SEQ ID NO: 502 - protein, 9 aa, Artificial Sequence
  Synthetic peptide
FAIHDIKNY

SEQ ID NO: 503 - protein, 11 aa, Artificial Sequence
  Synthetic peptide
YEKFSNAGLFY

SEQ ID NO: 504 - protein, 10 aa, Artificial Sequence
  Synthetic peptide
EKFSNAGLFY

SEQ ID NO: 505 - protein, 9 aa, Artificial Sequence
  Synthetic peptide
KFSNAGLFY

SEQ ID NO: 506 - protein, 10 aa, Artificial Sequence
  Synthetic peptide
YTSPTEITCY

SEQ ID NO: 507 - protein, 10 aa, Artificial Sequence
  Synthetic peptide
CGMKFCNWLY

SEQ ID NO: 508 - protein, 9 aa, Artificial Sequence
  Synthetic peptide
GMKFCNWLY

SEQ ID NO: 509 - protein, 10 aa, Artificial Sequence
  Synthetic peptide
MKFCNWLYEK

SEQ ID NO: 510 - protein, 10 aa, Artificial Sequence
  Synthetic peptide
HAFWSRNCGF

SEQ ID NO: 511 - protein, 9 aa, Artificial Sequence
  Synthetic peptide
WSRNCGFMR

SEQ ID NO: 512 - protein, 11 aa, Artificial Sequence
  Synthetic peptide
SRNCGFMRATL

SEQ ID NO: 513 - protein, 10 aa, Artificial Sequence
  Synthetic peptide
RNCGFMRATL

SEQ ID NO: 514 - protein, 10 aa, Artificial Sequence
  Synthetic peptide
MRATLGIIGL

SEQ ID NO: 515 - protein, 9 aa, Artificial Sequence
  Synthetic peptide
RATLGIIGL

SEQ ID NO: 516 - protein, 10 aa, Artificial Sequence
  Synthetic peptide
KKMIDSYNDY

SEQ ID NO: 517 - protein, 10 aa, Artificial Sequence
  Synthetic peptide
KMIDSYNDYY

SEQ ID NO: 518 - protein, 9 aa, Artificial Sequence
  Synthetic peptide
KMIDSYNDY

SEQ ID NO: 519 - protein, 9 aa, Artificial Sequence
  Synthetic peptide
MIDSYNDYY

SEQ ID NO: 520 - protein, 9 aa, Artificial Sequence
  Synthetic peptide
HQNRVYTHK

SEQ ID NO: 521 - protein, 11 aa, Artificial Sequence
  Synthetic peptide
RLEDMGFSKPF

SEQ ID NO: 522 - protein, 10 aa, Artificial Sequence
  Synthetic peptide
MGFSKPFMRF

SEQ ID NO: 523 - protein, 9 aa, Artificial Sequence
  Synthetic peptide
MGFSKPFMR

SEQ ID NO: 524 - protein, 10 aa, Artificial Sequence
  Synthetic peptide
FSKPFMRFIL

SEQ ID NO: 525 - protein, 9 aa, Artificial Sequence
  Synthetic peptide
MRFILANAF

SEQ ID NO: 526 - protein, 11 aa, Artificial Sequence
  Synthetic peptide
FILANAFIPPY

SEQ ID NO: 527 - protein, 10 aa, Artificial Sequence
  Synthetic peptide
ILANAFIPPY

SEQ ID NO: 528 - protein, 9 aa, Artificial Sequence
  Synthetic peptide
LANAFIPPY

SEQ ID NO: 529 - protein, 10 aa, Artificial Sequence
  Synthetic peptide
YRKYIHKIIL

SEQ ID NO: 530 - protein, 9 aa, Artificial Sequence
  Synthetic peptide
RKYIHKIIL

SEQ ID NO: 531 - protein, 9 aa, Artificial Sequence
  Synthetic peptide
ILNERYFTF

SEQ ID NO: 532 - protein, 9 aa, Artificial Sequence
  Synthetic peptide
NERYFTFKF

SEQ ID NO: 533 - protein, 9 aa, Artificial Sequence
  Synthetic peptide
RYFTFKFAA

SEQ ID NO: 534 - protein, 11 aa, Artificial Sequence
  Synthetic peptide
RYFTFKFAAHL

SEQ ID NO: 535 - protein, 9 aa, Artificial Sequence
  Synthetic peptide
FTFKFAAHL

SEQ ID NO: 536 - protein, 10 aa, Artificial Sequence
  Synthetic peptide
FTFKFAAHLL

SEQ ID NO: 537 - protein, 9 aa, Artificial Sequence
  Synthetic peptide
KFAAHLLSF

SEQ ID NO: 538 - protein, 9 aa, Artificial Sequence
  Synthetic peptide
AAHLLSFHK

SEQ ID NO: 539 - protein, 10 aa, Artificial Sequence
  Synthetic peptide
KVNLDNQTTY

SEQ ID NO: 540 - protein, 9 aa, Artificial Sequence
  Synthetic peptide
TTYCMTCGI

SEQ ID NO: 541 - protein, 9 aa, Artificial Sequence
  Synthetic peptide
CMTCGIEPI

SEQ ID NO: 542 - protein, 9 aa, Artificial Sequence
  Synthetic peptide
CNACKTLNY

SEQ ID NO: 543 - protein, 9 aa, Artificial Sequence
  Synthetic peptide
KTLNYKHYK

SEQ ID NO: 544 - protein, 11 aa, Artificial Sequence
  Synthetic peptide
KTLNYKHYKTL

SEQ ID NO: 545 - protein, 9 aa, Artificial Sequence
  Synthetic peptide
LNYKHYKTL

SEQ ID NO: 546 - protein, 10 aa, Artificial Sequence
  Synthetic peptide
KHYKTLNFSV

SEQ ID NO: 547 - protein, 9 aa, Artificial Sequence
  Synthetic peptide
KTLNFSVKL

SEQ ID NO: 548 - protein, 10 aa, Artificial Sequence
  Synthetic peptide
SHLEGFMRTY

SEQ ID NO: 549 - protein, 9 aa, Artificial Sequence
  Synthetic peptide
EGFMRTYLL

SEQ ID NO: 550 - protein, 9 aa, Artificial Sequence
  Synthetic peptide
RYIWSGLVY

SEQ ID NO: 551 - protein, 9 aa, Artificial Sequence
  Synthetic peptide
NTFKPDYTF

SEQ ID NO: 552 - protein, 9 aa, Artificial Sequence
  Synthetic peptide
MHSNVSFNF

SEQ ID NO: 553 - protein, 9 aa, Artificial Sequence
  Synthetic peptide
STSVGPHIF

SEQ ID NO: 554 - protein, 9 aa, Artificial Sequence
  Synthetic peptide
VLIEFLTGF

SEQ ID NO: 555 - protein, 10 aa, Artificial Sequence
  Synthetic peptide
VLIEFLTGFF

SEQ ID NO: 556 - protein, 10 aa, Artificial Sequence
  Synthetic peptide
LIEFLTGFFY

SEQ ID NO: 557 - protein, 9 aa, Artificial Sequence
  Synthetic peptide
LIEFLTGFF

SEQ ID NO: 558 - protein, 10 aa, Artificial Sequence
  Synthetic peptide
EFLTGFFYLY

SEQ ID NO: 559 - protein, 9 aa, Artificial Sequence
  Synthetic peptide
FLTGFFYLY

SEQ ID NO: 560 - protein, 9 aa, Artificial Sequence
  Synthetic peptide
TGFFYLYGK

SEQ ID NO: 561 - protein, 10 aa, Artificial Sequence
  Synthetic peptide
YGKRLFSISK

SEQ ID NO: 562 - protein, 10 aa, Artificial Sequence
  Synthetic peptide
KRLFSISKVM

SEQ ID NO: 563 - protein, 9 aa, Artificial Sequence
  Synthetic peptide
KRLFSISKV

SEQ ID NO: 564 - protein, 9 aa, Artificial Sequence
  Synthetic peptide
RLFSISKVM

SEQ ID NO: 565 - protein, 11 aa, Artificial Sequence
  Synthetic peptide
SKVMDMICLDY

SEQ ID NO: 566 - protein, 10 aa, Artificial Sequence
  Synthetic peptide
KVMDMICLDY

SEQ ID NO: 567 - protein, 11 aa, Artificial Sequence
  Synthetic peptide
KVMDMICLDYY

SEQ ID NO: 568 - protein, 10 aa, Artificial Sequence
  Synthetic peptide
VMDMICLDYY

SEQ ID NO: 569 - protein, 9 aa, Artificial Sequence
  Synthetic peptide
VMDMICLDY

SEQ ID NO: 570 - protein, 9 aa, Artificial Sequence
  Synthetic peptide
MDMICLDYY

SEQ ID NO: 571 - protein, 10 aa, Artificial Sequence
  Synthetic peptide
YTIIPAPLAM

SEQ ID NO: 572 - protein, 9 aa, Artificial Sequence
  Synthetic peptide
TIIPAPLAM

SEQ ID NO: 573 - protein, 9 aa, Artificial Sequence
  Synthetic peptide
IPAPLAMML

SEQ ID NO: 574 - protein, 9 aa, Artificial Sequence
  Synthetic peptide
LAMMLAARL

SEQ ID NO: 575 - protein, 10 aa, Artificial Sequence
  Synthetic peptide
MMLAARLKNY

SEQ ID NO: 576 - protein, 9 aa, Artificial Sequence
  Synthetic peptide
MLAARLKNY

SEQ ID NO: 577 - protein, 9 aa, Artificial Sequence
  Synthetic peptide
AARLKNYDL

SEQ ID NO: 578 - protein, 9 aa, Artificial Sequence
  Synthetic peptide
ARLKNYDLM

SEQ ID NO: 579 - protein, 9 aa, Artificial Sequence
  Synthetic peptide
KNYDLMKRL

SEQ ID NO: 580 - protein, 9 aa, Artificial Sequence
  Synthetic peptide
MKRLHEWEI

SEQ ID NO: 581 - protein, 10 aa, Artificial Sequence
  Synthetic peptide
KRLHEWEISI

SEQ ID NO: 582 - protein, 9 aa, Artificial Sequence
  Synthetic peptide
WEISIDYAL

SEQ ID NO: 583 - protein, 9 aa, Artificial Sequence
  Synthetic peptide
ISIDYALLV

SEQ ID NO: 584 - protein, 9 aa, Artificial Sequence
  Synthetic peptide
SIDYALLVV

SEQ ID NO: 585 - protein, 10 aa, Artificial Sequence
  Synthetic peptide
VVDDVPSIDY

SEQ ID NO: 586 - protein, 9 aa, Artificial Sequence
  Synthetic peptide
RAQKRELLR

SEQ ID NO: 587 - protein, 10 aa, Artificial Sequence
  Synthetic peptide
LRDNTFNPVY

SEQ ID NO: 588 - protein, 9 aa, Artificial Sequence
  Synthetic peptide
NTFNPVYKY

SEQ ID NO: 589 - protein, 9 aa, Artificial Sequence
  Synthetic peptide
KYLMNCSGF

SEQ ID NO: 590 - protein, 9 aa, Artificial Sequence
  Synthetic peptide
KNIIKELVF

SEQ ID NO: 591 - protein, 9 aa, Artificial Sequence
  Synthetic peptide
LVFNCSVLL

SEQ ID NO: 592 - protein, 10 aa, Artificial Sequence
  Synthetic peptide
EMVLHTEREY

SEQ ID NO: 593 - protein, 9 aa, Artificial Sequence
  Synthetic peptide
MVLHTEREY

SEQ ID NO: 594 - protein, 10 aa, Artificial Sequence
  Synthetic peptide
VLHTEREYAY

SEQ ID NO: 595 - protein, 10 aa, Artificial Sequence
  Synthetic peptide
HTEREYAYAL

SEQ ID NO: 596 - protein, 9 aa, Artificial Sequence
  Synthetic peptide
TEREYAYAL

SEQ ID NO: 597 - protein, 9 aa, Artificial Sequence
  Synthetic peptide
AAKHNQLPI

SEQ ID NO: 598 - protein, 9 aa, Artificial Sequence
  Synthetic peptide
KHNQLPILM

SEQ ID NO: 599 - protein, 10 aa, Artificial Sequence
  Synthetic peptide
KHNQLPILMY

SEQ ID NO: 600 - protein, 10 aa, Artificial Sequence
  Synthetic peptide
QSTDAESILL

SEQ ID NO: 601 - protein, 9 aa, Artificial Sequence
  Synthetic peptide
STDAESILL

SEQ ID NO: 602 - protein, 10 aa, Artificial Sequence
  Synthetic peptide
STDAESILLK

SEQ ID NO: 603 - protein, 9 aa, Artificial Sequence
  Synthetic peptide
CSDKNINCF

SEQ ID NO: 604 - protein, 10 aa, Artificial Sequence
  Synthetic peptide
KNINCFNYCI

SEQ ID NO: 605 - protein, 8 aa, Artificial Sequence
  Synthetic peptide
KNINCFNY

SEQ ID NO: 606 - protein, 11 aa, Artificial Sequence
  Synthetic peptide
KNINCFNYCIL

SEQ ID NO: 607 - protein, 9 aa, Artificial Sequence
  Synthetic peptide
NINCFNYCI

SEQ ID NO: 608 - protein, 10 aa, Artificial Sequence
  Synthetic peptide
INCFNYCILY

SEQ ID NO: 609 - protein, 10 aa, Artificial Sequence
  Synthetic peptide
KHDARMLINY

SEQ ID NO: 610 - protein, 9 aa, Artificial Sequence
  Synthetic peptide
ARMLINYCV

SEQ ID NO: 611 - protein, 10 aa, Artificial Sequence
  Synthetic peptide
ARMLINYCVM

SEQ ID NO: 612 - protein, 9 aa, Artificial Sequence
  Synthetic peptide
RMLINYCVM

SEQ ID NO: 613 - protein, 10 aa, Artificial Sequence
  Synthetic peptide
RMLINYCVML

SEQ ID NO: 614 - protein, 9 aa, Artificial Sequence
  Synthetic peptide
HIECAQHCF

SEQ ID NO: 615 - protein, 10 aa, Artificial Sequence
  Synthetic peptide
AQHCFKLQSY

SEQ ID NO: 616 - protein, 11 aa, Artificial Sequence
  Synthetic peptide
KKHIRNGNLTL

SEQ ID NO: 617 - protein, 10 aa, Artificial Sequence
  Synthetic peptide
KHIRNGNLTL

SEQ ID NO: 618 - protein, 11 aa, Artificial Sequence
  Synthetic peptide
KHIRNGNLTLF

SEQ ID NO: 619 - protein, 9 aa, Artificial Sequence
  Synthetic peptide
HIRNGNLTL

SEQ ID NO: 620 - protein, 10 aa, Artificial Sequence
  Synthetic peptide
HIRNGNLTLF

SEQ ID NO: 621 - protein, 9 aa, Artificial Sequence
  Synthetic peptide
IRNGNLTLF

SEQ ID NO: 622 - protein, 9 aa, Artificial Sequence
  Synthetic peptide
KTDPWIVNR

SEQ ID NO: 623 - protein, 9 aa, Artificial Sequence
  Synthetic peptide
KNGSSVFMW

SEQ ID NO: 624 - protein, 10 aa, Artificial Sequence
  Synthetic peptide
SSVFMWICIY

SEQ ID NO: 625 - protein, 9 aa, Artificial Sequence
  Synthetic peptide
SVFMWICIY

SEQ ID NO: 626 - protein, 10 aa, Artificial Sequence
  Synthetic peptide
GRIDFLKFLF

SEQ ID NO: 627 - protein, 9 aa, Artificial Sequence
  Synthetic peptide
GRIDFLKFL

SEQ ID NO: 628 - protein, 9 aa, Artificial Sequence
  Synthetic peptide
RIDFLKFLF

SEQ ID NO: 629 - protein, 9 aa, Artificial Sequence
  Synthetic peptide
SALHYLAEK

SEQ ID NO: 630 - protein, 10 aa, Artificial Sequence
  Synthetic peptide
HLILEGVLGY

SEQ ID NO: 631 - protein, 9 aa, Artificial Sequence
  Synthetic peptide
LILEGVLGY

SEQ ID NO: 632 - protein, 10 aa, Artificial Sequence
  Synthetic peptide
LILEGVLGYF

SEQ ID NO: 633 - protein, 9 aa, Artificial Sequence
  Synthetic peptide
ILEGVLGYF

SEQ ID NO: 634 - protein, 9 aa, Artificial Sequence
  Synthetic peptide
KAAIRGRSL

SEQ ID NO: 635 - protein, 11 aa, Artificial Sequence
  Synthetic peptide
IRGRSLNMLSL

SEQ ID NO: 636 - protein, 10 aa, Artificial Sequence
  Synthetic peptide
RGRSLNMLSL

SEQ ID NO: 637 - protein, 11 aa, Artificial Sequence
  Synthetic peptide
RGRSLNMLSLI

SEQ ID NO: 638 - protein, 9 aa, Artificial Sequence
  Synthetic peptide
RGRSLNMLS

SEQ ID NO: 639 - protein, 8 aa, Artificial Sequence
  Synthetic peptide
RGRSLNML

SEQ ID NO: 640 - protein, 9 aa, Artificial Sequence
  Synthetic peptide
GRSLNMLSL

SEQ ID NO: 641 - protein, 10 aa, Artificial Sequence
  Synthetic peptide
GRSLNMLSLI

SEQ ID NO: 642 - protein, 9 aa, Artificial Sequence
  Synthetic peptide
RSLNMLSLI

SEQ ID NO: 643 - protein, 8 aa, Artificial Sequence
  Synthetic peptide
RSLNMLSL

SEQ ID NO: 644 - protein, 11 aa, Artificial Sequence
  Synthetic peptide
RSLNMLSLIKF

SEQ ID NO: 645 - protein, 10 aa, Artificial Sequence
  Synthetic peptide
RSLNMLSLIK

SEQ ID NO: 646 - protein, 10 aa, Artificial Sequence
  Synthetic peptide
SLNMLSLIKF

SEQ ID NO: 647 - protein, 9 aa, Artificial Sequence
  Synthetic peptide
GADPTQKDY

SEQ ID NO: 648 - protein, 9 aa, Artificial Sequence
  Synthetic peptide
HRGFTAWDW

SEQ ID NO: 649 - protein, 10 aa, Artificial Sequence
  Synthetic peptide
RGFTAWDWAV

SEQ ID NO: 650 - protein, 11 aa, Artificial Sequence
  Synthetic peptide
RGFTAWDWAVF

SEQ ID NO: 651 - protein, 8 aa, Artificial Sequence
  Synthetic peptide
RGFTAWDW

SEQ ID NO: 652 - protein, 9 aa, Artificial Sequence
  Synthetic peptide
FTAWDWAVF

SEQ ID NO: 653 - protein, 10 aa, Artificial Sequence
  Synthetic peptide
WAVFTGNMEL

SEQ ID NO: 654 - protein, 9 aa, Artificial Sequence
  Synthetic peptide
AVFTGNMEL

SEQ ID NO: 655 - protein, 10 aa, Artificial Sequence
  Synthetic peptide
KSLNHDYQNL

SEQ ID NO: 656 - protein, 9 aa, Artificial Sequence
  Synthetic peptide
SLNHDYQNL

SEQ ID NO: 657 - protein, 9 aa, Artificial Sequence
  Synthetic peptide
QNLSTCISL

SEQ ID NO: 658 - protein, 10 aa, Artificial Sequence
  Synthetic peptide
QNLSTCISLF

SEQ ID NO: 659 - protein, 9 aa, Artificial Sequence
  Synthetic peptide
NLSTCISLF

SEQ ID NO: 660 - protein, 10 aa, Artificial Sequence
  Synthetic peptide
STCISLFTSW

SEQ ID NO: 661 - protein, 9 aa, Artificial Sequence
  Synthetic peptide
ISLFTSWMF

SEQ ID NO: 662 - protein, 9 aa, Artificial Sequence
  Synthetic peptide
GGLRKSPKL

SEQ ID NO: 663 - protein, 9 aa, Artificial Sequence
  Synthetic peptide
LRKSPKLLL

SEQ ID NO: 664 - protein, 10 aa, Artificial Sequence
  Synthetic peptide
LRKSPKLLLL

SEQ ID NO: 665 - protein, 9 aa, Artificial Sequence
  Synthetic peptide
RKSPKLLLL

SEQ ID NO: 666 - protein, 10 aa, Artificial Sequence
  Synthetic peptide
AVNIMSMKNF

SEQ ID NO: 667 - protein, 9 aa, Artificial Sequence
  Synthetic peptide
NIMSMKNFL

SEQ ID NO: 668 - protein, 10 aa, Artificial Sequence
  Synthetic peptide
MSMKNFLNRI

SEQ ID NO: 669 - protein, 9 aa, Artificial Sequence
  Synthetic peptide
MSMKNFLNR

SEQ ID NO: 670 - protein, 9 aa, Artificial Sequence
  Synthetic peptide
FTDEWKYCF

SEQ ID NO: 671 - protein, 9 aa, Artificial Sequence
  Synthetic peptide
YTLCDSPAY

SEQ ID NO: 672 - protein, 10 aa, Artificial Sequence
  Synthetic peptide
RVAYLILSNY

SEQ ID NO: 673 - protein, 9 aa, Artificial Sequence
  Synthetic peptide
QTLEKLYQY

SEQ ID NO: 674 - protein, 9 aa, Artificial Sequence
  Synthetic peptide
ATYQSSTLL

SEQ ID NO: 675 - protein, 10 aa, Artificial Sequence
  Synthetic peptide
RLFLTATPRY

SEQ ID NO: 676 - protein, 9 aa, Artificial Sequence
  Synthetic peptide
LSMKNRELF

SEQ ID NO: 677 - protein, 10 aa, Artificial Sequence
  Synthetic peptide
ELFGGVAFRY

SEQ ID NO: 678 - protein, 9 aa, Artificial Sequence
  Synthetic peptide
YVNDFELQM

SEQ ID NO: 679 - protein, 9 aa, Artificial Sequence
  Synthetic peptide
KQIIMALAY

SEQ ID NO: 680 - protein, 9 aa, Artificial Sequence
  Synthetic peptide
LVDQGVYAL

SEQ ID NO: 681 - protein, 9 aa, Artificial Sequence
  Synthetic peptide
SIIPFADAL

SEQ ID NO: 682 - protein, 9 aa, Artificial Sequence
  Synthetic peptide
RTVEICCRY

SEQ ID NO: 683 - protein, 9 aa, Artificial Sequence
  Synthetic peptide
ATLRFDTWY

SEQ ID NO: 684 - protein, 9 aa, Artificial Sequence
  Synthetic peptide
YHNIINEIL

SEQ ID NO: 685 - protein, 10 aa, Artificial Sequence
  Synthetic peptide
NIINEILVGY

SEQ ID NO: 686 - protein, 9 aa, Artificial Sequence
  Synthetic peptide
IINEILVGY

SEQ ID NO: 687 - protein, 9 aa, Artificial Sequence
  Synthetic peptide
ILVGYIKYY

SEQ ID NO: 688 - protein, 10 aa, Artificial Sequence
  Synthetic peptide
YINDISEHEL

SEQ ID NO: 689 - protein, 10 aa, Artificial Sequence
  Synthetic peptide
DISEHELSPY

SEQ ID NO: 690 - protein, 9 aa, Artificial Sequence
  Synthetic peptide
ISEHELSPY

SEQ ID NO: 691 - protein, 9 aa, Artificial Sequence
  Synthetic peptide
QQIKKILTY

SEQ ID NO: 692 - protein, 10 aa, Artificial Sequence
  Synthetic peptide
QQIKKILTYY

SEQ ID NO: 693 - protein, 9 aa, Artificial Sequence
  Synthetic peptide
QIKKILTYY

SEQ ID NO: 694 - protein, 9 aa, Artificial Sequence
  Synthetic peptide
KQVTITFSL

SEQ ID NO: 695 - protein, 9 aa, Artificial Sequence
  Synthetic peptide
FSLTSVQEI

SEQ ID NO: 696 - protein, 9 aa, Artificial Sequence
  Synthetic peptide
SVQEIKTQF

SEQ ID NO: 697 - protein, 9 aa, Artificial Sequence
  Synthetic peptide
FTGVVTELF

SEQ ID NO: 698 - protein, 9 aa, Artificial Sequence
  Synthetic peptide
INWGRICGF

SEQ ID NO: 699 - protein, 9 aa, Artificial Sequence
  Synthetic peptide
GRICGFIVF

SEQ ID NO: 700 - protein, 10 aa, Artificial Sequence
  Synthetic peptide
IVFSAKMAKY

SEQ ID NO: 701 - protein, 9 aa, Artificial Sequence
  Synthetic peptide
IVFSAKMAK

SEQ ID NO: 702 - protein, 9 aa, Artificial Sequence
  Synthetic peptide
ESTVITTAY

SEQ ID NO: 703 - protein, 10 aa, Artificial Sequence
  Synthetic peptide
STVITTAYNF

SEQ ID NO: 704 - protein, 9 aa, Artificial Sequence
  Synthetic peptide
TVITTAYNF

SEQ ID NO: 705 - protein, 9 aa, Artificial Sequence
  Synthetic peptide
YNFMKHNLL

SEQ ID NO: 706 - protein, 11 aa, Artificial Sequence
  Synthetic peptide
YNFMKHNLLPW

SEQ ID NO: 707 - protein, 9 aa, Artificial Sequence
  Synthetic peptide
FMKHNLLPW

SEQ ID NO: 708 - protein, 10 aa, Artificial Sequence
  Synthetic peptide
MKHNLLPWMI

SEQ ID NO: 709 - protein, 9 aa, Artificial Sequence
  Synthetic peptide
KHNLLPWMI

SEQ ID NO: 710 - protein, 9 aa, Artificial Sequence
  Synthetic peptide
ISHGGQEEF

SEQ ID NO: 711 - protein, 9 aa, Artificial Sequence
  Synthetic peptide
QEEFLAFSL

SEQ ID NO: 712 - protein, 11 aa, Artificial Sequence
  Synthetic peptide
FLAFSLHSDMY

SEQ ID NO: 713 - protein, 10 aa, Artificial Sequence
  Synthetic peptide
FLAFSLHSDM

SEQ ID NO: 714 - protein, 10 aa, Artificial Sequence
  Synthetic peptide
LAFSLHSDMY

SEQ ID NO: 715 - protein, 9 aa, Artificial Sequence
  Synthetic peptide
LAFSLHSDM

SEQ ID NO: 716 - protein, 9 aa, Artificial Sequence
  Synthetic peptide
AFSLHSDMY

SEQ ID NO: 717 - protein, 10 aa, Artificial Sequence
  Synthetic peptide
FSLHSDMYSV

SEQ ID NO: 718 - protein, 9 aa, Artificial Sequence
  Synthetic peptide
SLHSDMYSV

SEQ ID NO: 719 - protein, 10 aa, Artificial Sequence
  Synthetic peptide
SLHSDMYSVI

SEQ ID NO: 720 - protein, 11 aa, Artificial Sequence
  Synthetic peptide
SLHSDMYSVIF

SEQ ID NO: 721 - protein, 10 aa, Artificial Sequence
  Synthetic peptide
LHSDMYSVIF

SEQ ID NO: 722 - protein, 9 aa, Artificial Sequence
  Synthetic peptide
LHSDMYSVI

SEQ ID NO: 723 - protein, 9 aa, Artificial Sequence
  Synthetic peptide
HSDMYSVIF

SEQ ID NO: 724 - protein, 11 aa, Artificial Sequence
  Synthetic peptide
HSDMYSVIFNI

SEQ ID NO: 725 - protein, 10 aa, Artificial Sequence
  Synthetic peptide
SDMYSVIFNI

SEQ ID NO: 726 - protein, 11 aa, Artificial Sequence
  Synthetic peptide
DMYSVIFNIKY

SEQ ID NO: 727 - protein, 9 aa, Artificial Sequence
  Synthetic peptide
DMYSVIFNI

SEQ ID NO: 728 - protein, 10 aa, Artificial Sequence
  Synthetic peptide
MYSVIFNIKY

SEQ ID NO: 729 - protein, 9 aa, Artificial Sequence
  Synthetic peptide
MYSVIFNIK

SEQ ID NO: 730 - protein, 9 aa, Artificial Sequence
  Synthetic peptide
YSVIFNIKY

SEQ ID NO: 731 - protein, 11 aa, Artificial Sequence
  Synthetic peptide
YSVIFNIKYFL

SEQ ID NO: 732 - protein, 10 aa, Artificial Sequence
  Synthetic peptide
YSVIFNIKYF

SEQ ID NO: 733 - protein, 9 aa, Artificial Sequence
  Synthetic peptide
SVIFNIKYF

SEQ ID NO: 734 - protein, 10 aa, Artificial Sequence
  Synthetic peptide
SVIFNIKYFL

SEQ ID NO: 735 - protein, 9 aa, Artificial Sequence
  Synthetic peptide
VIFNIKYFL

SEQ ID NO: 736 - protein, 11 aa, Artificial Sequence
  Synthetic peptide
VIFNIKYFLSK

SEQ ID NO: 737 - protein, 10 aa, Artificial Sequence
  Synthetic peptide
IFNIKYFLSK

SEQ ID NO: 738 - protein, 9 aa, Artificial Sequence
  Synthetic peptide
FNIKYFLSK

SEQ ID NO: 739 - protein, 10 aa, Artificial Sequence
  Synthetic peptide
FNIKYFLSKF

SEQ ID NO: 740 - protein, 9 aa, Artificial Sequence
  Synthetic peptide
NIKYFLSKF

SEQ ID NO: 741 - protein, 10 aa, Artificial Sequence
  Synthetic peptide
LSKFCNHMFF

SEQ ID NO: 742 - protein, 9 aa, Artificial Sequence
  Synthetic peptide
LSKFCNHMF

SEQ ID NO: 743 - protein, 9 aa, Artificial Sequence
  Synthetic peptide
SKFCNHMFF

SEQ ID NO: 744 - protein, 10 aa, Artificial Sequence
  Synthetic peptide
SKFCNHMFFR

SEQ ID NO: 745 - protein, 9 aa, Artificial Sequence
  Synthetic peptide
NHMFFRSCV

SEQ ID NO: 746 - protein, 9 aa, Artificial Sequence
  Synthetic peptide
YTKKMELLF

SEQ ID NO: 747 - protein, 9 aa, Artificial Sequence
  Synthetic peptide
QMDKLGFLL

SEQ ID NO: 748 - protein, 10 aa, Artificial Sequence
  Synthetic peptide
WANENPRWLM

SEQ ID NO: 749 - protein, 9 aa, Artificial Sequence
  Synthetic peptide
ILQDYGIEY

SEQ ID NO: 750 - protein, 9 aa, Artificial Sequence
  Synthetic peptide
IIFPSNDFF

SEQ ID NO: 751 - protein, 9 aa, Artificial Sequence
  Synthetic peptide
TNFFTLHEL

SEQ ID NO: 752 - protein, 9 aa, Artificial Sequence
  Synthetic peptide
KVKEVLYFY

SEQ ID NO: 753 - protein, 9 aa, Artificial Sequence
  Synthetic peptide
KMAQWVRQW

SEQ ID NO: 754 - protein, 9 aa, Artificial Sequence
  Synthetic peptide
MAQWVRQWM

SEQ ID NO: 755 - protein, 9 aa, Artificial Sequence
  Synthetic peptide
NIMPGLVSY

SEQ ID NO: 756 - protein, 9 aa, Artificial Sequence
  Synthetic peptide
FTDNLCFMM

SEQ ID NO: 757 - protein, 10 aa, Artificial Sequence
  Synthetic peptide
CFMMQCKSIY

SEQ ID NO: 758 - protein, 9 aa, Artificial Sequence
  Synthetic peptide
FMMQCKSIY

SEQ ID NO: 759 - protein, 10 aa, Artificial Sequence
  Synthetic peptide
KSIYKVGNPF

SEQ ID NO: 760 - protein, 9 aa, Artificial Sequence
  Synthetic peptide
SIYKVGNPF

SEQ ID NO: 761 - protein, 9 aa, Artificial Sequence
  Synthetic peptide
YTLQELISY

SEQ ID NO: 762 - protein, 10 aa, Artificial Sequence
  Synthetic peptide
STLAARLSVY

SEQ ID NO: 763 - protein, 9 aa, Artificial Sequence
  Synthetic peptide
SSFSKAVRL

SEQ ID NO: 764 - protein, 9 aa, Artificial Sequence
  Synthetic peptide
AIFDSYIDY

SEQ ID NO: 765 - protein, 9 aa, Artificial Sequence
  Synthetic peptide
ETMKNSYLL

SEQ ID NO: 766 - protein, 9 aa, Artificial Sequence
  Synthetic peptide
ITHASPTMF

SEQ ID NO: 767 - protein, 9 aa, Artificial Sequence
  Synthetic peptide
KSNGIQNYI

SEQ ID NO: 768 - protein, 10 aa, Artificial Sequence
  Synthetic peptide
QRLNAPNLKY

SEQ ID NO: 769 - protein, 9 aa, Artificial Sequence
  Synthetic peptide
RLNAPNLKY

SEQ ID NO: 770 - protein, 11 aa, Artificial Sequence
  Synthetic peptide
AMDEAIHAALY

SEQ ID NO: 771 - protein, 10 aa, Artificial Sequence
  Synthetic peptide
AAMQGLRNGY

SEQ ID NO: 772 - protein, 9 aa, Artificial Sequence
  Synthetic peptide
AMQGLRNGY

SEQ ID NO: 773 - protein, 10 aa, Artificial Sequence
  Synthetic peptide
FVSQSMSLNY

SEQ ID NO: 774 - protein, 9 aa, Artificial Sequence
  Synthetic peptide
VSQSMSLNY

SEQ ID NO: 775 - protein, 10 aa, Artificial Sequence
  Synthetic peptide
VSQSMSLNYY

SEQ ID NO: 776 - protein, 10 aa, Artificial Sequence
  Synthetic peptide
SQSMSLNYYF

SEQ ID NO: 777 - protein, 9 aa, Artificial Sequence
  Synthetic peptide
SQSMSLNYY

SEQ ID NO: 778 - protein, 9 aa, Artificial Sequence
  Synthetic peptide
QSMSLNYYF

SEQ ID NO: 779 - protein, 10 aa, Artificial Sequence
  Synthetic peptide
QSMSLNYYFY

SEQ ID NO: 780 - protein, 9 aa, Artificial Sequence
  Synthetic peptide
SMSLNYYFY

SEQ ID NO: 781 - protein, 9 aa, Artificial Sequence
  Synthetic peptide
KGLTTGSYY

SEQ ID NO: 782 - protein, 9 aa, Artificial Sequence
  Synthetic peptide
TTGSYYCHF

SEQ ID NO: 783 - protein, 11 aa, Artificial Sequence
  Synthetic peptide
KSKQASISSIL

SEQ ID NO: 784 - protein, 10 aa, Artificial Sequence
  Synthetic peptide
KSKQASISSI

SEQ ID NO: 785 - protein, 10 aa, Artificial Sequence
  Synthetic peptide
SKQASISSIL

SEQ ID NO: 786 - protein, 9 aa, Artificial Sequence
  Synthetic peptide
SKQASISSI

SEQ ID NO: 787 - protein, 9 aa, Artificial Sequence
  Synthetic peptide
KQASISSIL

SEQ ID NO: 788 - protein, 11 aa, Artificial Sequence
  Synthetic peptide
KQASISSILNF

SEQ ID NO: 789 - protein, 8 aa, Artificial Sequence
  Synthetic peptide
KQASISSI

SEQ ID NO: 790 - protein, 10 aa, Artificial Sequence
  Synthetic peptide
QASISSILNF

SEQ ID NO: 791 - protein, 9 aa, Artificial Sequence
  Synthetic peptide
ASISSILNF

SEQ ID NO: 792 - protein, 10 aa, Artificial Sequence
  Synthetic peptide
ASISSILNFF

SEQ ID NO: 793 - protein, 11 aa, Artificial Sequence
  Synthetic peptide
ASISSILNFFF

SEQ ID NO: 794 - protein, 9 aa, Artificial Sequence
  Synthetic peptide
SISSILNFF

SEQ ID NO: 795 - protein, 10 aa, Artificial Sequence
  Synthetic peptide
SISSILNFFF

SEQ ID NO: 796 - protein, 11 aa, Artificial Sequence
  Synthetic peptide
SISSILNFFFF

SEQ ID NO: 797 - protein, 9 aa, Artificial Sequence
  Synthetic peptide
ISSILNFFF

SEQ ID NO: 798 - protein, 10 aa, Artificial Sequence
  Synthetic peptide
ISSILNFFFF

SEQ ID NO: 799 - protein, 11 aa, Artificial Sequence
  Synthetic peptide
ISSILNFFFFY

SEQ ID NO: 800 - protein, 8 aa, Artificial Sequence
  Synthetic peptide
ISSILNFF

SEQ ID NO: 801 - protein, 9 aa, Artificial Sequence
  Synthetic peptide
SSILNFFFF

SEQ ID NO: 802 - protein, 10 aa, Artificial Sequence
  Synthetic peptide
SSILNFFFFY

SEQ ID NO: 803 - protein, 11 aa, Artificial Sequence
  Synthetic peptide
SSILNFFFFYI

SEQ ID NO: 804 - protein, 8 aa, Artificial Sequence
  Synthetic peptide
SSILNFFF

SEQ ID NO: 805 - protein, 9 aa, Artificial Sequence
  Synthetic peptide
SILNFFFFY

SEQ ID NO: 806 - protein, 10 aa, Artificial Sequence
  Synthetic peptide
SILNFFFFYI

SEQ ID NO: 807 - protein, 8 aa, Artificial Sequence
  Synthetic peptide
SILNFFFF

SEQ ID NO: 808 - protein, 9 aa, Artificial Sequence
  Synthetic peptide
ILNFFFFYI

SEQ ID NO: 809 - protein, 10 aa, Artificial Sequence
  Synthetic peptide
NFFFFYIMEY

SEQ ID NO: 810 - protein, 9 aa, Artificial Sequence
  Synthetic peptide
FFFFYIMEY

SEQ ID NO: 811 - protein, 9 aa, Artificial Sequence
  Synthetic peptide
FFFYIMEYF

SEQ ID NO: 812 - protein, 10 aa, Artificial Sequence
  Synthetic peptide
FYIMEYFVAV

SEQ ID NO: 813 - protein, 9 aa, Artificial Sequence
  Synthetic peptide
YIMEYFVAV

SEQ ID NO: 814 - protein, 9 aa, Artificial Sequence
  Synthetic peptide
SSRDDFWEW

SEQ ID NO: 815 - protein, 9 aa, Artificial Sequence
  Synthetic peptide
WEWEAAQPF

SEQ ID NO: 816 - protein, 9 aa, Artificial Sequence
  Synthetic peptide
IMDVFYETY

SEQ ID NO: 817 - protein, 9 aa, Artificial Sequence
  Synthetic peptide
YSLPYNINL

SEQ ID NO: 818 - protein, 9 aa, Artificial Sequence
  Synthetic peptide
RVHKNLVLF

SEQ ID NO: 819 - protein, 9 aa, Artificial Sequence
  Synthetic peptide
RTSPSYCEI

SEQ ID NO: 820 - protein, 9 aa, Artificial Sequence
  Synthetic peptide
GTNNFVETY

SEQ ID NO: 821 - protein, 10 aa, Artificial Sequence
  Synthetic peptide
QSRLPNFTLY

SEQ ID NO: 822 - protein, 9 aa, Artificial Sequence
  Synthetic peptide
ILDEVESIF

SEQ ID NO: 823 - protein, 9 aa, Artificial Sequence
  Synthetic peptide
YFAPSFAIF

SEQ ID NO: 824 - protein, 9 aa, Artificial Sequence
  Synthetic peptide
RTYNILQRF

SEQ ID NO: 825 - protein, 9 aa, Artificial Sequence
  Synthetic peptide
RAQHDTYYF

SEQ ID NO: 826 - protein, 10 aa, Artificial Sequence
  Synthetic peptide
SHFNNVSYYW

SEQ ID NO: 827 - protein, 9 aa, Artificial Sequence
  Synthetic peptide
NNVSYYWGL

SEQ ID NO: 828 - protein, 10 aa, Artificial Sequence
  Synthetic peptide
QTISNHQLSF

SEQ ID NO: 829 - protein, 10 aa, Artificial Sequence
  Synthetic peptide
ISNHQLSFTY

SEQ ID NO: 830 - protein, 10 aa, Artificial Sequence
  Synthetic peptide
RPIYYKTPYY

SEQ ID NO: 831 - protein, 9 aa, Artificial Sequence
  Synthetic peptide
SHMYAIMLL

SEQ ID NO: 832 - protein, 10 aa, Artificial Sequence
  Synthetic peptide
YDLSAISFEF

SEQ ID NO: 833 - protein, 9 aa, Artificial Sequence
  Synthetic peptide
SAISFEFKL

SEQ ID NO: 834 - protein, 9 aa, Artificial Sequence
  Synthetic peptide
MAANLMTVM

SEQ ID NO: 835 - protein, 9 aa, Artificial Sequence
  Synthetic peptide
AMFFTRSEW

SEQ ID NO: 836 - protein, 10 aa, Artificial Sequence
  Synthetic peptide
RSEWASSNTF

SEQ ID NO: 837 - protein, 9 aa, Artificial Sequence
  Synthetic peptide
SEWASSNTF

SEQ ID NO: 838 - protein, 9 aa, Artificial Sequence
  Synthetic peptide
SSNTFREKF

SEQ ID NO: 839 - protein, 9 aa, Artificial Sequence
  Synthetic peptide
ASSSMHSGM

SEQ ID NO: 840 - protein, 11 aa, Artificial Sequence
  Synthetic peptide
ASSSMHSGMLY

SEQ ID NO: 841 - protein, 10 aa, Artificial Sequence
  Synthetic peptide
SSSMHSGMLY

SEQ ID NO: 842 - protein, 9 aa, Artificial Sequence
  Synthetic peptide
SSMHSGMLY

SEQ ID NO: 843 - protein, 10 aa, Artificial Sequence
  Synthetic peptide
SSMHSGMLYK

SEQ ID NO: 844 - protein, 9 aa, Artificial Sequence
  Synthetic peptide
VVVDEAHFF

SEQ ID NO: 845 - protein, 9 aa, Artificial Sequence
  Synthetic peptide
ILAGGSELY

SEQ ID NO: 846 - protein, 9 aa, Artificial Sequence
  Synthetic peptide
KLEGHPFLF

SEQ ID NO: 847 - protein, 10 aa, Artificial Sequence
  Synthetic peptide
YINFRLKTFY

SEQ ID NO: 848 - protein, 10 aa, Artificial Sequence
  Synthetic peptide
KTFYISPNKY

SEQ ID NO: 849 - protein, 9 aa, Artificial Sequence
  Synthetic peptide
FLKKNIYLY

SEQ ID NO: 850 - protein, 10 aa, Artificial Sequence
  Synthetic peptide
HSKALATLLY

SEQ ID NO: 851 - protein, 10 aa, Artificial Sequence
  Synthetic peptide
HLPIPILPFY

SEQ ID NO: 852 - protein, 9 aa, Artificial Sequence
  Synthetic peptide
FVEEWPTLL

SEQ ID NO: 853 - protein, 9 aa, Artificial Sequence
  Synthetic peptide
GSFLIGTPF

SEQ ID NO: 854 - protein, 9 aa, Artificial Sequence
  Synthetic peptide
YEMLMNSPW

SEQ ID NO: 855 - protein, 10 aa, Artificial Sequence
  Synthetic peptide
MLMNSPWPSM

SEQ ID NO: 856 - protein, 9 aa, Artificial Sequence
  Synthetic peptide
KLKRIPPFY

SEQ ID NO: 857 - protein, 10 aa, Artificial Sequence
  Synthetic peptide
AVNSTGLIGY

SEQ ID NO: 858 - protein, 10 aa, Artificial Sequence
  Synthetic peptide
KQMFNVDITY

SEQ ID NO: 859 - protein, 9 aa, Artificial Sequence
  Synthetic peptide
QMFNVDITY

SEQ ID NO: 860 - protein, 9 aa, Artificial Sequence
  Synthetic peptide
KARLCGLSY

SEQ ID NO: 861 - protein, 9 aa, Artificial Sequence
  Synthetic peptide
RFNTLHIHY

SEQ ID NO: 862 - protein, 9 aa, Artificial Sequence
  Synthetic peptide
KSIHVLDPI

SEQ ID NO: 863 - protein, 9 aa, Artificial Sequence
  Synthetic peptide
KSDENAVQY

SEQ ID NO: 864 - protein, 9 aa, Artificial Sequence
  Synthetic peptide
MMRRVHASY

SEQ ID NO: 865 - protein, 10 aa, Artificial Sequence
  Synthetic peptide
RRVHASYPGY

SEQ ID NO: 866 - protein, 9 aa, Artificial Sequence
  Synthetic peptide
RVHASYPGY

SEQ ID NO: 867 - protein, 9 aa, Artificial Sequence
  Synthetic peptide
MVDEVEFWL

SEQ ID NO: 868 - protein, 10 aa, Artificial Sequence
  Synthetic peptide
LGLAALVSPY

SEQ ID NO: 869 - protein, 9 aa, Artificial Sequence
  Synthetic peptide
GLAALVSPY

SEQ ID NO: 870 - protein, 9 aa, Artificial Sequence
  Synthetic peptide
CTQPARVTY

SEQ ID NO: 871 - protein, 9 aa, Artificial Sequence
  Synthetic peptide
RQTGGWYCF

SEQ ID NO: 872 - protein, 10 aa, Artificial Sequence
  Synthetic peptide
RVDMNRFFQF

SEQ ID NO: 873 - protein, 11 aa, Artificial Sequence
  Synthetic peptide
RVDMNRFFQFY

SEQ ID NO: 874 - protein, 10 aa, Artificial Sequence
  Synthetic peptide
VDMNRFFQFY

SEQ ID NO: 875 - protein, 9 aa, Artificial Sequence
  Synthetic peptide
DMNRFFQFY

SEQ ID NO: 876 - protein, 9 aa, Artificial Sequence
  Synthetic peptide
FQFYNEMPL

SEQ ID NO: 877 - protein, 9 aa, Artificial Sequence
  Synthetic peptide
VVTDGTAFL

SEQ ID NO: 878 - protein, 10 aa, Artificial Sequence
  Synthetic peptide
KMFNGQTGEY

SEQ ID NO: 879 - protein, 10 aa, Artificial Sequence
  Synthetic peptide
AIYNASHPIY

SEQ ID NO: 880 - protein, 9 aa, Artificial Sequence
  Synthetic peptide
SSIVFQHEM

SEQ ID NO: 881 - protein, 9 aa, Artificial Sequence
  Synthetic peptide
KTVEPTNFL

SEQ ID NO: 882 - protein, 9 aa, Artificial Sequence
  Synthetic peptide
VTNAWLKMY

SEQ ID NO: 883 - protein, 10 aa, Artificial Sequence
  Synthetic peptide
FISAINHFNY

SEQ ID NO: 884 - protein, 9 aa, Artificial Sequence
  Synthetic peptide
ISAINHFNY

SEQ ID NO: 885 - protein, 10 aa, Artificial Sequence
  Synthetic peptide
SAINHFNYTM

SEQ ID NO: 886 - protein, 9 aa, Artificial Sequence
  Synthetic peptide
AINHFNYTM

SEQ ID NO: 887 - protein, 9 aa, Artificial Sequence
  Synthetic peptide
YTMMHYPTF

SEQ ID NO: 888 - protein, 10 aa, Artificial Sequence
  Synthetic peptide
TMMHYPTFNW

SEQ ID NO: 889 - protein, 9 aa, Artificial Sequence
  Synthetic peptide
MMHYPTFNW

SEQ ID NO: 890 - protein, 9 aa, Artificial Sequence
  Synthetic peptide
ALEDHYGLY

SEQ ID NO: 891 - protein, 9 aa, Artificial Sequence
  Synthetic peptide
YTLNHAFTL

SEQ ID NO: 892 - protein, 9 aa, Artificial Sequence
  Synthetic peptide
SLICVFSHF

SEQ ID NO: 893 - protein, 10 aa, Artificial Sequence
  Synthetic peptide
FGMKCYRHFY

SEQ ID NO: 894 - protein, 9 aa, Artificial Sequence
  Synthetic peptide
GMKCYRHFY

SEQ ID NO: 895 - protein, 9 aa, Artificial Sequence
  Synthetic peptide
KQSGLQSFY

SEQ ID NO: 896 - protein, 9 aa, Artificial Sequence
  Synthetic peptide
SGLQSFYLY

SEQ ID NO: 897 - protein, 9 aa, Artificial Sequence
  Synthetic peptide
ITNKIYMFF

SEQ ID NO: 898 - protein, 10 aa, Artificial Sequence
  Synthetic peptide
VVMEDIHSYF

SEQ ID NO: 899 - protein, 9 aa, Artificial Sequence
  Synthetic peptide
VVMEDIHSY

SEQ ID NO: 900 - protein, 9 aa, Artificial Sequence
  Synthetic peptide
VMEDIHSYF

SEQ ID NO: 901 - protein, 9 aa, Artificial Sequence
  Synthetic peptide
SYFPKQFNF

SEQ ID NO: 902 - protein, 9 aa, Artificial Sequence
  Synthetic peptide
FSNKKYIGL

SEQ ID NO: 903 - protein, 9 aa, Artificial Sequence
  Synthetic peptide
SNKKYIGLI

SEQ ID NO: 904 - protein, 9 aa, Artificial Sequence
  Synthetic peptide
KIDDYSILI

SEQ ID NO: 905 - protein, 9 aa, Artificial Sequence
  Synthetic peptide
YQNDDKIFY

SEQ ID NO: 906 - protein, 10 aa, Artificial Sequence
  Synthetic peptide
WVGYNNVCYY

SEQ ID NO: 907 - protein, 9 aa, Artificial Sequence
  Synthetic peptide
WVGYNNVCY

SEQ ID NO: 908 - protein, 9 aa, Artificial Sequence
  Synthetic peptide
VGYNNVCYY

SEQ ID NO: 909 - protein, 10 aa, Artificial Sequence
  Synthetic peptide
VGYNNVCYYF

SEQ ID NO: 910 - protein, 9 aa, Artificial Sequence
  Synthetic peptide
KNYNNASNY

SEQ ID NO: 911 - protein, 9 aa, Artificial Sequence
  Synthetic peptide
STLTNNNTI

SEQ ID NO: 912 - protein, 9 aa, Artificial Sequence
  Synthetic peptide
LTNNNTILV

SEQ ID NO: 913 - protein, 9 aa, Artificial Sequence
  Synthetic peptide
VNLTKTLNL

SEQ ID NO: 914 - protein, 9 aa, Artificial Sequence
  Synthetic peptide
LTKTLNLTK

SEQ ID NO: 915 - protein, 9 aa, Artificial Sequence
  Synthetic peptide
KTLNLTKTY

SEQ ID NO: 916 - protein, 9 aa, Artificial Sequence
  Synthetic peptide
KTYNHESNY

SEQ ID NO: 917 - protein, 10 aa, Artificial Sequence
  Synthetic peptide
KTYNHESNYW

SEQ ID NO: 918 - protein, 10 aa, Artificial Sequence
  Synthetic peptide
ESNYWVNYSL

SEQ ID NO: 919 - protein, 9 aa, Artificial Sequence
  Synthetic peptide
SNYWVNYSL

SEQ ID NO: 920 - protein, 10 aa, Artificial Sequence
  Synthetic peptide
SNYWVNYSLI

SEQ ID NO: 921 - protein, 10 aa, Artificial Sequence
  Synthetic peptide
SVLLRDSGYY

SEQ ID NO: 922 - protein, 9 aa, Artificial Sequence
  Synthetic peptide
SVLLRDSGY

SEQ ID NO: 923 - protein, 9 aa, Artificial Sequence
  Synthetic peptide
VLLRDSGYY

SEQ ID NO: 924 - protein, 10 aa, Artificial Sequence
  Synthetic peptide
KKQKHVSLLY

SEQ ID NO: 925 - protein, 9 aa, Artificial Sequence
  Synthetic peptide
KKQKHVSLL

SEQ ID NO: 926 - protein, 9 aa, Artificial Sequence
  Synthetic peptide
KQKHVSLLY

SEQ ID NO: 927 - protein, 10 aa, Artificial Sequence
  Synthetic peptide
KQKHVSLLYI

SEQ ID NO: 928 - protein, 9 aa, Artificial Sequence
  Synthetic peptide
VSLLYICSK

SEQ ID NO: 929 - protein, 10 aa, Artificial Sequence
  Synthetic peptide
FSNIVLSIDY

SEQ ID NO: 930 - protein, 9 aa, Artificial Sequence
  Synthetic peptide
LSIDYWVSF

SEQ ID NO: 931 - protein, 10 aa, Artificial Sequence
  Synthetic peptide
SIDYWVSFNK

SEQ ID NO: 932 - protein, 9 aa, Artificial Sequence
  Synthetic peptide
VSFNKTIIL

SEQ ID NO: 933 - protein, 9 aa, Artificial Sequence
  Synthetic peptide
NNDINGVSW

SEQ ID NO: 934 - protein, 9 aa, Artificial Sequence
  Synthetic peptide
DINGVSWNF

SEQ ID NO: 935 - protein, 10 aa, Artificial Sequence
  Synthetic peptide
VSWNFFNNSF

SEQ ID NO: 936 - protein, 9 aa, Artificial Sequence
  Synthetic peptide
SWNFFNNSF

SEQ ID NO: 937 - protein, 9 aa, Artificial Sequence
  Synthetic peptide
CSNYSTSIY

SEQ ID NO: 938 - protein, 9 aa, Artificial Sequence
  Synthetic peptide
YNITNNCSL

SEQ ID NO: 939 - protein, 9 aa, Artificial Sequence
  Synthetic peptide
ITNNCSLTI

SEQ ID NO: 940 - protein, 10 aa, Artificial Sequence
  Synthetic peptide
ITNNCSLTIF

SEQ ID NO: 941 - protein, 9 aa, Artificial Sequence
  Synthetic peptide
TIFPHNDVF

SEQ ID NO: 942 - protein, 9 aa, Artificial Sequence
  Synthetic peptide
HNDVFDTTY

SEQ ID NO: 943 - protein, 9 aa, Artificial Sequence
  Synthetic peptide
YQVVWNQII

SEQ ID NO: 944 - protein, 9 aa, Artificial Sequence
  Synthetic peptide
VVWNQIINY

SEQ ID NO: 945 - protein, 9 aa, Artificial Sequence
  Synthetic peptide
WNQIINYTI

SEQ ID NO: 946 - protein, 9 aa, Artificial Sequence
  Synthetic peptide
ITYNCTNFL

SEQ ID NO: 947 - protein, 10 aa, Artificial Sequence
  Synthetic peptide
ITYNCTNFLI

SEQ ID NO: 948 - protein, 9 aa, Artificial Sequence
  Synthetic peptide
TYNCTNFLI

SEQ ID NO: 949 - protein, 11 aa, Artificial Sequence
  Synthetic peptide
YLNINDTFVKY

SEQ ID NO: 950 - protein, 10 aa, Artificial Sequence
  Synthetic peptide
LNINDTFVKY

SEQ ID NO: 951 - protein, 9 aa, Artificial Sequence
  Synthetic peptide
NINDTFVKY

SEQ ID NO: 952 - protein, 10 aa, Artificial Sequence
  Synthetic peptide
KYTNESILEY

SEQ ID NO: 953 - protein, 9 aa, Artificial Sequence
  Synthetic peptide
YTNESILEY

SEQ ID NO: 954 - protein, 9 aa, Artificial Sequence
  Synthetic peptide
NNFTATCII

SEQ ID NO: 955 - protein, 9 aa, Artificial Sequence
  Synthetic peptide
ISTSNETTL

SEQ ID NO: 956 - protein, 9 aa, Artificial Sequence
  Synthetic peptide
STSNETTLI

SEQ ID NO: 957 - protein, 11 aa, Artificial Sequence
  Synthetic peptide
SNETTLINCTY

SEQ ID NO: 958 - protein, 10 aa, Artificial Sequence
  Synthetic peptide
NETTLINCTY

SEQ ID NO: 959 - protein, 9 aa, Artificial Sequence
  Synthetic peptide
ETTLINCTY

SEQ ID NO: 960 - protein, 10 aa, Artificial Sequence
  Synthetic peptide
ETTLINCTYL

SEQ ID NO: 961 - protein, 9 aa, Artificial Sequence
  Synthetic peptide
TTLINCTYL

SEQ ID NO: 962 - protein, 8 aa, Artificial Sequence
  Synthetic peptide
TTLINCTY

SEQ ID NO: 963 - protein, 10 aa, Artificial Sequence
  Synthetic peptide
TLINCTYLTL

SEQ ID NO: 964 - protein, 9 aa, Artificial Sequence
  Synthetic peptide
LINCTYLTL

SEQ ID NO: 965 - protein, 10 aa, Artificial Sequence
  Synthetic peptide
CTYLTLSSNY

SEQ ID NO: 966 - protein, 11 aa, Artificial Sequence
  Synthetic peptide
TYLTLSSNYFY

SEQ ID NO: 967 - protein, 9 aa, Artificial Sequence
  Synthetic peptide
TYLTLSSNY

SEQ ID NO: 968 - protein, 10 aa, Artificial Sequence
  Synthetic peptide
TYLTLSSNYF

SEQ ID NO: 969 - protein, 10 aa, Artificial Sequence
  Synthetic peptide
YLTLSSNYFY

SEQ ID NO: 970 - protein, 9 aa, Artificial Sequence
  Synthetic peptide
YLTLSSNYF

SEQ ID NO: 971 - protein, 9 aa, Artificial Sequence
  Synthetic peptide
LTLSSNYFY

SEQ ID NO: 972 - protein, 11 aa, Artificial Sequence
  Synthetic peptide
LTLSSNYFYTF

SEQ ID NO: 973 - protein, 10 aa, Artificial Sequence
  Synthetic peptide
LTLSSNYFYT

SEQ ID NO: 974 - protein, 10 aa, Artificial Sequence
  Synthetic peptide
TLSSNYFYTF

SEQ ID NO: 975 - protein, 8 aa, Artificial Sequence
  Synthetic peptide
TLSSNYFY

SEQ ID NO: 976 - protein, 11 aa, Artificial Sequence
  Synthetic peptide
TLSSNYFYTFF

SEQ ID NO: 977 - protein, 9 aa, Artificial Sequence
  Synthetic peptide
LSSNYFYTF

SEQ ID NO: 978 - protein, 10 aa, Artificial Sequence
  Synthetic peptide
LSSNYFYTFF

SEQ ID NO: 979 - protein, 11 aa, Artificial Sequence
  Synthetic peptide
LSSNYFYTFFK

SEQ ID NO: 980 - protein, 9 aa, Artificial Sequence
  Synthetic peptide
SSNYFYTFF

SEQ ID NO: 981 - protein, 8 aa, Artificial Sequence
  Synthetic peptide
SSNYFYTF

SEQ ID NO: 982 - protein, 10 aa, Artificial Sequence
  Synthetic peptide
SSNYFYTFFK

SEQ ID NO: 983 - protein, 11 aa, Artificial Sequence
  Synthetic peptide
SSNYFYTFFKL

SEQ ID NO: 984 - protein, 10 aa, Artificial Sequence
  Synthetic peptide
SNYFYTFFKL

SEQ ID NO: 985 - protein, 9 aa, Artificial Sequence
  Synthetic peptide
SNYFYTFFK

SEQ ID NO: 986 - protein, 11 aa, Artificial Sequence
  Synthetic peptide
SNYFYTFFKLY

SEQ ID NO: 987 - protein, 8 aa, Artificial Sequence
  Synthetic peptide
SNYFYTFF

SEQ ID NO: 988 - protein, 9 aa, Artificial Sequence
  Synthetic peptide
NYFYTFFKL

SEQ ID NO: 989 - protein, 10 aa, Artificial Sequence
  Synthetic peptide
NYFYTFFKLY

SEQ ID NO: 990 - protein, 8 aa, Artificial Sequence
  Synthetic peptide
NYFYTFFK

SEQ ID NO: 991 - protein, 11 aa, Artificial Sequence
  Synthetic peptide
NYFYTFFKLYY

SEQ ID NO: 992 - protein, 9 aa, Artificial Sequence
  Synthetic peptide
YFYTFFKLY

SEQ ID NO: 993 - protein, 10 aa, Artificial Sequence
  Synthetic peptide
YFYTFFKLYY

SEQ ID NO: 994 - protein, 9 aa, Artificial Sequence
  Synthetic peptide
FYTFFKLYY

SEQ ID NO: 995 - protein, 10 aa, Artificial Sequence
  Synthetic peptide
FYTFFKLYYI

SEQ ID NO: 996 - protein, 9 aa, Artificial Sequence
  Synthetic peptide
YTFFKLYYI

SEQ ID NO: 997 - protein, 8 aa, Artificial Sequence
  Synthetic peptide
YTFFKLYY

SEQ ID NO: 998 - protein, 11 aa, Artificial Sequence
  Synthetic peptide
YTFFKLYYIPL

SEQ ID NO: 999 - protein, 10 aa, Artificial Sequence
  Synthetic peptide
TFFKLYYIPL

SEQ ID NO: 1000 - protein, 9 aa, Artificial Sequence
  Synthetic peptide
FFKLYYIPL

SEQ ID NO: 1001 - protein, 10 aa, Artificial Sequence
  Synthetic peptide
FKLYYIPLSI

SEQ ID NO: 1002 - protein, 9 aa, Artificial Sequence
  Synthetic peptide
KLYYIPLSI

SEQ ID NO: 1003 - protein, 10 aa, Artificial Sequence
  Synthetic peptide
KLYYIPLSII

SEQ ID NO: 1004 - protein, 9 aa, Artificial Sequence
  Synthetic peptide
IPLSIIIGI

SEQ ID NO: 1005 - protein, 9 aa, Artificial Sequence
  Synthetic peptide
ISIITFLSL

SEQ ID NO: 1006 - protein, 9 aa, Artificial Sequence
  Synthetic peptide
KRKKHVEEI

SEQ ID NO: 1007 - protein, 9 aa, Artificial Sequence
  Synthetic peptide
LLPKPYSRY

SEQ ID NO: 1008 - protein, 10 aa, Artificial Sequence
  Synthetic peptide
YSRYQYNTPI

SEQ ID NO: 1009 - protein, 11 aa, Artificial Sequence
  Synthetic peptide
YSRYQYNTPIY

SEQ ID NO: 1010 - protein, 9 aa, Artificial Sequence
  Synthetic peptide
SRYQYNTPI

SEQ ID NO: 1011 - protein, 11 aa, Artificial Sequence
  Synthetic peptide
SRYQYNTPIYY

SEQ ID NO: 1012 - protein, 10 aa, Artificial Sequence
  Synthetic peptide
SRYQYNTPIY

SEQ ID NO: 1013 - protein, 10 aa, Artificial Sequence
  Synthetic peptide
RYQYNTPIYY

SEQ ID NO: 1014 - protein, 9 aa, Artificial Sequence
  Synthetic peptide
RYQYNTPIY

SEQ ID NO: 1015 - protein, 10 aa, Artificial Sequence
  Synthetic peptide
YQYNTPIYYM

SEQ ID NO: 1016 - protein, 9 aa, Artificial Sequence
  Synthetic peptide
YQYNTPIYY

SEQ ID NO: 1017 - protein, 9 aa, Artificial Sequence
  Synthetic peptide
YMRPSTQPL

SEQ ID NO: 1018 - protein, 10 aa, Artificial Sequence
  Synthetic peptide
STQPLNPFPL

SEQ ID NO: 1019 - protein, 9 aa, Artificial Sequence
  Synthetic peptide
TQPLNPFPL

SEQ ID NO: 1020 - protein, 9 aa, Artificial Sequence
  Synthetic peptide
QTNCQLYFF

SEQ ID NO: 1021 - protein, 9 aa, Artificial Sequence
  Synthetic peptide
IITAMTHLM

SEQ ID NO: 1022 - protein, 9 aa, Artificial Sequence
  Synthetic peptide
SSQKLVQLF

SEQ ID NO: 1023 - protein, 10 aa, Artificial Sequence
  Synthetic peptide
SSQKLVQLFY

SEQ ID NO: 1024 - protein, 9 aa, Artificial Sequence
  Synthetic peptide
SQKLVQLFY

SEQ ID NO: 1025 - protein, 9 aa, Artificial Sequence
  Synthetic peptide
LVDEIYSTL

SEQ ID NO: 1026 - protein, 9 aa, Artificial Sequence
  Synthetic peptide
KTFSPQCFM

SEQ ID NO: 1027 - protein, 10 aa, Artificial Sequence
  Synthetic peptide
GSFSPETLGY

SEQ ID NO: 1028 - protein, 9 aa, Artificial Sequence
  Synthetic peptide
NIIQFTHQY

SEQ ID NO: 1029 - protein, 9 aa, Artificial Sequence
  Synthetic peptide
FTHQYIELY

SEQ ID NO: 1030 - protein, 9 aa, Artificial Sequence
  Synthetic peptide
STMYSVSPV

SEQ ID NO: 1031 - protein, 10 aa, Artificial Sequence
  Synthetic peptide
STMYSVSPVF

SEQ ID NO: 1032 - protein, 9 aa, Artificial Sequence
  Synthetic peptide
TMYSVSPVF

SEQ ID NO: 1033 - protein, 10 aa, Artificial Sequence
  Synthetic peptide
SVSPVFTSGY

SEQ ID NO: 1034 - protein, 10 aa, Artificial Sequence
  Synthetic peptide
FTSGYMPLLY

SEQ ID NO: 1035 - protein, 9 aa, Artificial Sequence
  Synthetic peptide
TSGYMPLLY

SEQ ID NO: 1036 - protein, 10 aa, Artificial Sequence
  Synthetic peptide
LLYDLYRAGY

SEQ ID NO: 1037 - protein, 9 aa, Artificial Sequence
  Synthetic peptide
KQLRSGLQY

SEQ ID NO: 1038 - protein, 10 aa, Artificial Sequence
  Synthetic peptide
KVLESIRVLY

SEQ ID NO: 1039 - protein, 9 aa, Artificial Sequence
  Synthetic peptide
VLESIRVLY

SEQ ID NO: 1040 - protein, 10 aa, Artificial Sequence
  Synthetic peptide
AVNVCLPLVY

SEQ ID NO: 1041 - protein, 9 aa, Artificial Sequence
  Synthetic peptide
SSLNAYVTF

SEQ ID NO: 1042 - protein, 9 aa, Artificial Sequence
  Synthetic peptide
IANNFREAF

SEQ ID NO: 1043 - protein, 9 aa, Artificial Sequence
  Synthetic peptide
STLIYLRAY

SEQ ID NO: 1044 - protein, 9 aa, Artificial Sequence
  Synthetic peptide
RAYELFLKY

SEQ ID NO: 1045 - protein, 9 aa, Artificial Sequence
  Synthetic peptide
RADQRTRLF

SEQ ID NO: 1046 - protein, 9 aa, Artificial Sequence
  Synthetic peptide
TALKASLEF

SEQ ID NO: 1047 - protein, 10 aa, Artificial Sequence
  Synthetic peptide
KASLEFNTFY

SEQ ID NO: 1048 - protein, 9 aa, Artificial Sequence
  Synthetic peptide
ASLEFNTFY

SEQ ID NO: 1049 - protein, 10 aa, Artificial Sequence
  Synthetic peptide
SLEFNTFYAF

SEQ ID NO: 1050 - protein, 9 aa, Artificial Sequence
  Synthetic peptide
AVIEAIGAM

SEQ ID NO: 1051 - protein, 9 aa, Artificial Sequence
  Synthetic peptide
AVDSAVRIF

SEQ ID NO: 1052 - protein, 9 aa, Artificial Sequence
  Synthetic peptide
VVNEYHTTF

SEQ ID NO: 1053 - protein, 9 aa, Artificial Sequence
  Synthetic peptide
VTDPASALL

SEQ ID NO: 1054 - protein, 10 aa, Artificial Sequence
  Synthetic peptide
VTDPASALLY

SEQ ID NO: 1055 - protein, 9 aa, Artificial Sequence
  Synthetic peptide
SALLYSIEF

SEQ ID NO: 1056 - protein, 9 aa, Artificial Sequence
  Synthetic peptide
SSMDDISAY

SEQ ID NO: 1057 - protein, 9 aa, Artificial Sequence
  Synthetic peptide
SAYSSPGLF

SEQ ID NO: 1058 - protein, 9 aa, Artificial Sequence
  Synthetic peptide
ETLENLLSM

SEQ ID NO: 1059 - protein, 10 aa, Artificial Sequence
  Synthetic peptide
SEVIEWLHSF

SEQ ID NO: 1060 - protein, 9 aa, Artificial Sequence
  Synthetic peptide
EVIEWLHSF

SEQ ID NO: 1061 - protein, 9 aa, Artificial Sequence
  Synthetic peptide
HSFCETFHL

SEQ ID NO: 1062 - protein, 9 aa, Artificial Sequence
  Synthetic peptide
TTMCNGLVL

SEQ ID NO: 1063 - protein, 9 aa, Artificial Sequence
  Synthetic peptide
LAIPPPAPF

SEQ ID NO: 1064 - protein, 9 aa, Artificial Sequence
  Synthetic peptide
ATRQVQHFY

SEQ ID NO: 1065 - protein, 9 aa, Artificial Sequence
  Synthetic peptide
KTRGTRLFF

SEQ ID NO: 1066 - protein, 10 aa, Artificial Sequence
  Synthetic peptide
KTLKTVYPEY

SEQ ID NO: 1067 - protein, 9 aa, Artificial Sequence
  Synthetic peptide
TVYPEYYGY

SEQ ID NO: 1068 - protein, 9 aa, Artificial Sequence
  Synthetic peptide
ISNSQRLEF

SEQ ID NO: 1069 - protein, 10 aa, Artificial Sequence
  Synthetic peptide
YLMQHFRDHF

SEQ ID NO: 1070 - protein, 9 aa, Artificial Sequence
  Synthetic peptide
YLMQHFRDH

SEQ ID NO: 1071 - protein, 9 aa, Artificial Sequence
  Synthetic peptide
LMQHFRDHF

SEQ ID NO: 1072 - protein, 10 aa, Artificial Sequence
  Synthetic peptide
LMQHFRDHFI

SEQ ID NO: 1073 - protein, 9 aa, Artificial Sequence
  Synthetic peptide
MQHFRDHFI

SEQ ID NO: 1074 - protein, 11 aa, Artificial Sequence
  Synthetic peptide
MQHFRDHFIAL

SEQ ID NO: 1075 - protein, 10 aa, Artificial Sequence
  Synthetic peptide
MQHFRDHFIA

SEQ ID NO: 1076 - protein, 10 aa, Artificial Sequence
  Synthetic peptide
QHFRDHFIAL

SEQ ID NO: 1077 - protein, 11 aa, Artificial Sequence
  Synthetic peptide
QHFRDHFIALF

SEQ ID NO: 1078 - protein, 10 aa, Artificial Sequence
  Synthetic peptide
HFRDHFIALF

SEQ ID NO: 1079 - protein, 9 aa, Artificial Sequence
  Synthetic peptide
HFRDHFIAL

SEQ ID NO: 1080 - protein, 8 aa, Artificial Sequence
  Synthetic peptide
FRDHFIAL

SEQ ID NO: 1081 - protein, 9 aa, Artificial Sequence
  Synthetic peptide
FRDHFIALF

SEQ ID NO: 1082 - protein, 11 aa, Artificial Sequence
  Synthetic peptide
RDHFIALFPQY

SEQ ID NO: 1083 - protein, 10 aa, Artificial Sequence
  Synthetic peptide
DHFIALFPQY

SEQ ID NO: 1084 - protein, 9 aa, Artificial Sequence
  Synthetic peptide
HFIALFPQY

SEQ ID NO: 1085 - protein, 9 aa, Artificial Sequence
  Synthetic peptide
FIALFPQYI

SEQ ID NO: 1086 - protein, 11 aa, Artificial Sequence
  Synthetic peptide
FIALFPQYISY

SEQ ID NO: 1087 - protein, 10 aa, Artificial Sequence
  Synthetic peptide
IALFPQYISY

SEQ ID NO: 1088 - protein, 11 aa, Artificial Sequence
  Synthetic peptide
IALFPQYISYY

SEQ ID NO: 1089 - protein, 9 aa, Artificial Sequence
  Synthetic peptide
ALFPQYISY

SEQ ID NO: 1090 - protein, 10 aa, Artificial Sequence
  Synthetic peptide
ALFPQYISYY

SEQ ID NO: 1091 - protein, 9 aa, Artificial Sequence
  Synthetic peptide
LFPQYISYY

SEQ ID NO: 1092 - protein, 8 aa, Artificial Sequence
  Synthetic peptide
FPQYISYY

SEQ ID NO: 1093 - protein, 11 aa, Artificial Sequence
  Synthetic peptide
FPQYISYYTKY

SEQ ID NO: 1094 - protein, 9 aa, Artificial Sequence
  Synthetic peptide
FPQYISYYT

SEQ ID NO: 1095 - protein, 10 aa, Artificial Sequence
  Synthetic peptide
FPQYISYYTK

SEQ ID NO: 1096 - protein, 10 aa, Artificial Sequence
  Synthetic peptide
PQYISYYTKY

SEQ ID NO: 1097 - protein, 9 aa, Artificial Sequence
  Synthetic peptide
QYISYYTKY

SEQ ID NO: 1098 - protein, 8 aa, Artificial Sequence
  Synthetic peptide
YISYYTKY

SEQ ID NO: 1099 - protein, 10 aa, Artificial Sequence
  Synthetic peptide
AHQSKYAMLY

SEQ ID NO: 1100 - protein, 9 aa, Artificial Sequence
  Synthetic peptide
HQSKYAMLY

SEQ ID NO: 1101 - protein, 10 aa, Artificial Sequence
  Synthetic peptide
VLIPKHLWSY

SEQ ID NO: 1102 - protein, 9 aa, Artificial Sequence
  Synthetic peptide
LIPKHLWSY

SEQ ID NO: 1103 - protein, 10 aa, Artificial Sequence
  Synthetic peptide
WIRNNFSISY

SEQ ID NO: 1104 - protein, 10 aa, Artificial Sequence
  Synthetic peptide
FSISYIPLIY

SEQ ID NO: 1105 - protein, 9 aa, Artificial Sequence
  Synthetic peptide
SISYIPLIY

SEQ ID NO: 1106 - protein, 9 aa, Artificial Sequence
  Synthetic peptide
CSSCMVRTY

SEQ ID NO: 1107 - protein, 10 aa, Artificial Sequence
  Synthetic peptide
RTIPVAWDRF

SEQ ID NO: 1108 - protein, 9 aa, Artificial Sequence
  Synthetic peptide
MTSLLKTDF

SEQ ID NO: 1109 - protein, 9 aa, Artificial Sequence
  Synthetic peptide
AALEVVREF

SEQ ID NO: 1110 - protein, 9 aa, Artificial Sequence
  Synthetic peptide
QTMRVRTDF

SEQ ID NO: 1111 - protein, 10 aa, Artificial Sequence
  Synthetic peptide
RTDFVWVADL

SEQ ID NO: 1112 - protein, 9 aa, Artificial Sequence
  Synthetic peptide
LSYMPPNIF

SEQ ID NO: 1113 - protein, 9 aa, Artificial Sequence
  Synthetic peptide
VAIHGFAAY

SEQ ID NO: 1114 - protein, 9 aa, Artificial Sequence
  Synthetic peptide
HGFAAYALL

SEQ ID NO: 1115 - protein, 10 aa, Artificial Sequence
  Synthetic peptide
HGFAAYALLY

SEQ ID NO: 1116 - protein, 9 aa, Artificial Sequence
  Synthetic peptide
KTEFPQPSY

SEQ ID NO: 1117 - protein, 9 aa, Artificial Sequence
  Synthetic peptide
YMDYSPPIF

SEQ ID NO: 1118 - protein, 9 aa, Artificial Sequence
  Synthetic peptide
VVSPQYLLL

SEQ ID NO: 1119 - protein, 10 aa, Artificial Sequence
  Synthetic peptide
FTRFANTSPF

SEQ ID NO: 1120 - protein, 10 aa, Artificial Sequence
  Synthetic peptide
SLPDVSTLPY

SEQ ID NO: 1121 - protein, 9 aa, Artificial Sequence
  Synthetic peptide
FSYEKNLLF

SEQ ID NO: 1122 - protein, 9 aa, Artificial Sequence
  Synthetic peptide
MQMKKISNY

SEQ ID NO: 1123 - protein, 9 aa, Artificial Sequence
  Synthetic peptide
SSDYSSLQF

SEQ ID NO: 1124 - protein, 9 aa, Artificial Sequence
  Synthetic peptide
SSLQFHHIL

SEQ ID NO: 1125 - protein, 9 aa, Artificial Sequence
  Synthetic peptide
YMDAGQKPF

SEQ ID NO: 1126 - protein, 10 aa, Artificial Sequence
  Synthetic peptide
RGMDLLRSLF

SEQ ID NO: 1127 - protein, 10 aa, Artificial Sequence
  Synthetic peptide
RALKMYEDYY

SEQ ID NO: 1128 - protein, 9 aa, Artificial Sequence
  Synthetic peptide
RALKMYEDY

SEQ ID NO: 1129 - protein, 9 aa, Artificial Sequence
  Synthetic peptide
IMDDLVEEY

SEQ ID NO: 1130 - protein, 9 aa, Artificial Sequence
  Synthetic peptide
ITSNVLTTF

SEQ ID NO: 1131 - protein, 9 aa, Artificial Sequence
  Synthetic peptide
ISSGTPGLF

SEQ ID NO: 1132 - protein, 9 aa, Artificial Sequence
  Synthetic peptide
ISNTAVSVF

SEQ ID NO: 1133 - protein, 10 aa, Artificial Sequence
  Synthetic peptide
FESDWLNSYF

SEQ ID NO: 1134 - protein, 9 aa, Artificial Sequence
  Synthetic peptide
ESDWLNSYF

SEQ ID NO: 1135 - protein, 10 aa, Artificial Sequence
  Synthetic peptide
GTYSGLMLDY

SEQ ID NO: 1136 - protein, 9 aa, Artificial Sequence
  Synthetic peptide
HSASVPSLL

SEQ ID NO: 1137 - protein, 10 aa, Artificial Sequence
  Synthetic peptide
HSASVPSLLY

SEQ ID NO: 1138 - protein, 9 aa, Artificial Sequence
  Synthetic peptide
SASVPSLLY

SEQ ID NO: 1139 - protein, 9 aa, Artificial Sequence
  Synthetic peptide
ALANTSANY

SEQ ID NO: 1140 - protein, 10 aa, Artificial Sequence
  Synthetic peptide
SILAEYVYSY

SEQ ID NO: 1141 - protein, 9 aa, Artificial Sequence
  Synthetic peptide
ILAEYVYSY

SEQ ID NO: 1142 - protein, 10 aa, Artificial Sequence
  Synthetic peptide
YSYNGMLEHY

SEQ ID NO: 1143 - protein, 9 aa, Artificial Sequence
  Synthetic peptide
MIAKVIYAM

SEQ ID NO: 1144 - protein, 9 aa, Artificial Sequence
  Synthetic peptide
RVMDRITEH

SEQ ID NO: 1145 - protein, 9 aa, Artificial Sequence
  Synthetic peptide
TLDTNPHLL

SEQ ID NO: 1146 - protein, 9 aa, Artificial Sequence
  Synthetic peptide
YASKLNISL

SEQ ID NO: 1147 - protein, 9 aa, Artificial Sequence
  Synthetic peptide
ATMVAASNY

SEQ ID NO: 1148 - protein, 9 aa, Artificial Sequence
  Synthetic peptide
MVAASNYNF

SEQ ID NO: 1149 - protein, 9 aa, Artificial Sequence
  Synthetic peptide
GTWRRLRHY

SEQ ID NO: 1150 - protein, 9 aa, Artificial Sequence
  Synthetic peptide
KSQDTLHRF

SEQ ID NO: 1151 - protein, 9 aa, Artificial Sequence
  Synthetic peptide
NLSEVVTAY

SEQ ID NO: 1152 - protein, 9 aa, Artificial Sequence
  Synthetic peptide
SVLEKYLQW

SEQ ID NO: 1153 - protein, 9 aa, Artificial Sequence
  Synthetic peptide
MALPKDMLL

SEQ ID NO: 1154 - protein, 9 aa, Artificial Sequence
  Synthetic peptide
TLLEPGHLY

SEQ ID NO: 1155 - protein, 9 aa, Artificial Sequence
  Synthetic peptide
STALPVHVF

SEQ ID NO: 1156 - protein, 9 aa, Artificial Sequence
  Synthetic peptide
YGVETHWPL

SEQ ID NO: 1157 - protein, 10 aa, Artificial Sequence
  Synthetic peptide
YGVETHWPLY

SEQ ID NO: 1158 - protein, 9 aa, Artificial Sequence
  Synthetic peptide
GVETHWPLY

SEQ ID NO: 1159 - protein, 9 aa, Artificial Sequence
  Synthetic peptide
MAEIRFLSM

SEQ ID NO: 1160 - protein, 10 aa, Artificial Sequence
  Synthetic peptide
RSIETYYPEW

SEQ ID NO: 1161 - protein, 11 aa, Artificial Sequence
  Synthetic peptide
RVFPGHFYPLY

SEQ ID NO: 1162 - protein, 10 aa, Artificial Sequence
  Synthetic peptide
EARMCFSGYF

SEQ ID NO: 1163 - protein, 9 aa, Artificial Sequence
  Synthetic peptide
RMCFSGYFW

SEQ ID NO: 1164 - protein, 9 aa, Artificial Sequence
  Synthetic peptide
SGYFWQAAI

SEQ ID NO: 1165 - protein, 9 aa, Artificial Sequence
  Synthetic peptide
AVLAGIPPF

SEQ ID NO: 1166 - protein, 11 aa, Artificial Sequence
  Synthetic peptide
YTGRNGIHFSY

SEQ ID NO: 1167 - protein, 9 aa, Artificial Sequence
  Synthetic peptide
MLSPVSKQY

SEQ ID NO: 1168 - protein, 10 aa, Artificial Sequence
  Synthetic peptide
YLEINVCHRY

SEQ ID NO: 1169 - protein, 9 aa, Artificial Sequence
  Synthetic peptide
TINDFNKLY

SEQ ID NO: 1170 - protein, 9 aa, Artificial Sequence
  Synthetic peptide
HTIRRDMDF

SEQ ID NO: 1171 - protein, 9 aa, Artificial Sequence
  Synthetic peptide
RSLHLYAIF

SEQ ID NO: 1172 - protein, 9 aa, Artificial Sequence
  Synthetic peptide
RCQHHAFSY

SEQ ID NO: 1173 - protein, 9 aa, Artificial Sequence
  Synthetic peptide
SEDFQYWTF

SEQ ID NO: 1174 - protein, 9 aa, Artificial Sequence
  Synthetic peptide
ITAPRSVAL

SEQ ID NO: 1175 - protein, 10 aa, Artificial Sequence
  Synthetic peptide
ITAPRSVALF

SEQ ID NO: 1176 - protein, 9 aa, Artificial Sequence
  Synthetic peptide
KAQMSALAL

SEQ ID NO: 1177 - protein, 10 aa, Artificial Sequence
  Synthetic peptide
AQMSALALTM

SEQ ID NO: 1178 - protein, 9 aa, Artificial Sequence
  Synthetic peptide
QMSALALTM

SEQ ID NO: 1179 - protein, 10 aa, Artificial Sequence
  Synthetic peptide
KTIPFFKIAF

SEQ ID NO: 1180 - protein, 10 aa, Artificial Sequence
  Synthetic peptide
RAAHCFGHAF

SEQ ID NO: 1181 - protein, 9 aa, Artificial Sequence
  Synthetic peptide
AAHCFGHAF

SEQ ID NO: 1182 - protein, 9 aa, Artificial Sequence
  Synthetic peptide
FTSIWNEIF

SEQ ID NO: 1183 - protein, 9 aa, Artificial Sequence
  Synthetic peptide
GAAPVYNEY

SEQ ID NO: 1184 - protein, 9 aa, Artificial Sequence
  Synthetic peptide
LSDLRNFSF

SEQ ID NO: 1185 - protein, 9 aa, Artificial Sequence
  Synthetic peptide
SSIPKNKLF

SEQ ID NO: 1186 - protein, 9 aa, Artificial Sequence
  Synthetic peptide
KTFPQVASL

SEQ ID NO: 1187 - protein, 10 aa, Artificial Sequence
  Synthetic peptide
FSEHTKFFSY

SEQ ID NO: 1188 - protein, 9 aa, Artificial Sequence
  Synthetic peptide
VSNILHSVF

SEQ ID NO: 1189 - protein, 9 aa, Artificial Sequence
  Synthetic peptide
TSIKPVSPF

SEQ ID NO: 1190 - protein, 9 aa, Artificial Sequence
  Synthetic peptide
KTKTAIYVY

SEQ ID NO: 1191 - protein, 10 aa, Artificial Sequence
  Synthetic peptide
ISIFETLGAY

SEQ ID NO: 1192 - protein, 10 aa, Artificial Sequence
  Synthetic peptide
SIFETLGAYF

SEQ ID NO: 1193 - protein, 9 aa, Artificial Sequence
  Synthetic peptide
KMLDSFYKY

SEQ ID NO: 1194 - protein, 9 aa, Artificial Sequence
  Synthetic peptide
MLDSFYKYF

SEQ ID NO: 1195 - protein, 9 aa, Artificial Sequence
  Synthetic peptide
ITTEKMLPF

SEQ ID NO: 1196 - protein, 10 aa, Artificial Sequence
  Synthetic peptide
KEMQDYSLTF

SEQ ID NO: 1197 - protein, 11 aa, Artificial Sequence
  Synthetic peptide
KEMQDYSLTFL

SEQ ID NO: 1198 - protein, 9 aa, Artificial Sequence
  Synthetic peptide
EMQDYSLTF

SEQ ID NO: 1199 - protein, 10 aa, Artificial Sequence
  Synthetic peptide
EMQDYSLTFL

SEQ ID NO: 1200 - protein, 11 aa, Artificial Sequence
  Synthetic peptide
EMQDYSLTFLL

SEQ ID NO: 1201 - protein, 10 aa, Artificial Sequence
  Synthetic peptide
MQDYSLTFLL

SEQ ID NO: 1202 - protein, 9 aa, Artificial Sequence
  Synthetic peptide
MQDYSLTFL

SEQ ID NO: 1203 - protein, 11 aa, Artificial Sequence
  Synthetic peptide
MQDYSLTFLLK

SEQ ID NO: 1204 - protein, 8 aa, Artificial Sequence
  Synthetic peptide
MQDYSLTF

SEQ ID NO: 1205 - protein, 10 aa, Artificial Sequence
  Synthetic peptide
QDYSLTFLLK

SEQ ID NO: 1206 - protein, 9 aa, Artificial Sequence
  Synthetic peptide
QDYSLTFLL

SEQ ID NO: 1207 - protein, 10 aa, Artificial Sequence
  Synthetic peptide
DYSLTFLLKK

SEQ ID NO: 1208 - protein, 9 aa, Artificial Sequence
  Synthetic peptide
DYSLTFLLK

SEQ ID NO: 1209 - protein, 9 aa, Artificial Sequence
  Synthetic peptide
YSLTFLLKK

SEQ ID NO: 1210 - protein, 10 aa, Artificial Sequence
  Synthetic peptide
YSLTFLLKKR

SEQ ID NO: 1211 - protein, 8 aa, Artificial Sequence
  Synthetic peptide
YSLTFLLK

SEQ ID NO: 1212 - protein, 10 aa, Artificial Sequence
  Synthetic peptide
TFLLKKRMEL

SEQ ID NO: 1213 - protein, 9 aa, Artificial Sequence
  Synthetic peptide
FLLKKRMEL

SEQ ID NO: 1214 - protein, 10 aa, Artificial Sequence
  Synthetic peptide
FLLKKRMELY

SEQ ID NO: 1215 - protein, 9 aa, Artificial Sequence
  Synthetic peptide
LLKKRMELY

SEQ ID NO: 1216 - protein, 10 aa, Artificial Sequence
  Synthetic peptide
KKRMELYNKF

SEQ ID NO: 1217 - protein, 9 aa, Artificial Sequence
  Synthetic peptide
KKRMELYNK

SEQ ID NO: 1218 - protein, 11 aa, Artificial Sequence
  Synthetic peptide
KKRMELYNKFL

SEQ ID NO: 1219 - protein, 9 aa, Artificial Sequence
  Synthetic peptide
KRMELYNKF

SEQ ID NO: 1220 - protein, 10 aa, Artificial Sequence
  Synthetic peptide
KRMELYNKFL

SEQ ID NO: 1221 - protein, 11 aa, Artificial Sequence
  Synthetic peptide
KRMELYNKFLR

SEQ ID NO: 1222 - protein, 9 aa, Artificial Sequence
  Synthetic peptide
RMELYNKFL

SEQ ID NO: 1223 - protein, 10 aa, Artificial Sequence
  Synthetic peptide
RMELYNKFLR

SEQ ID NO: 1224 - protein, 11 aa, Artificial Sequence
  Synthetic peptide
RMELYNKFLRK

SEQ ID NO: 1225 - protein, 10 aa, Artificial Sequence
  Synthetic peptide
MELYNKFLRK

SEQ ID NO: 1226 - protein, 9 aa, Artificial Sequence
  Synthetic peptide
ELYNKFLRK

SEQ ID NO: 1227 - protein, 9 aa, Artificial Sequence
  Synthetic peptide
ETYARLSSY

SEQ ID NO: 1228 - protein, 9 aa, Artificial Sequence
  Synthetic peptide
SSYNRSLLH

SEQ ID NO: 1229 - protein, 9 aa, Artificial Sequence
  Synthetic peptide
RSSTSKSSY

SEQ ID NO: 1230 - protein, 9 aa, Artificial Sequence
  Synthetic peptide
STSKSSYPL

SEQ ID NO: 1231 - protein, 9 aa, Artificial Sequence
  Synthetic peptide
KSSYPLTKF

SEQ ID NO: 1232 - protein, 9 aa, Artificial Sequence
  Synthetic peptide
KTFNQSGLF

SEQ ID NO: 1233 - protein, 9 aa, Artificial Sequence
  Synthetic peptide
FIDKTTVLY

SEQ ID NO: 1234 - protein, 9 aa, Artificial Sequence
  Synthetic peptide
RQTMMSSIY

SEQ ID NO: 1235 - protein, 9 aa, Artificial Sequence
  Synthetic peptide
CAAELHPLF

SEQ ID NO: 1236 - protein, 9 aa, Artificial Sequence
  Synthetic peptide
STVPLPTAF

SEQ ID NO: 1237 - protein, 9 aa, Artificial Sequence
  Synthetic peptide
KSNPYWSKF

SEQ ID NO: 1238 - protein, 10 aa, Artificial Sequence
  Synthetic peptide
KQLYQRTNPY

SEQ ID NO: 1239 - protein, 9 aa, Artificial Sequence
  Synthetic peptide
QLYQRTNPY

SEQ ID NO: 1240 - protein, 10 aa, Artificial Sequence
  Synthetic peptide
RLIMTSFIGY

SEQ ID NO: 1241 - protein, 9 aa, Artificial Sequence
  Synthetic peptide
LIMTSFIGY

SEQ ID NO: 1242 - protein, 9 aa, Artificial Sequence
  Synthetic peptide
MTSFIGYVF

SEQ ID NO: 1243 - protein, 10 aa, Artificial Sequence
  Synthetic peptide
KALQEWMPSY

SEQ ID NO: 1244 - protein, 9 aa, Artificial Sequence
  Synthetic peptide
ALQEWMPSY

SEQ ID NO: 1245 - protein, 9 aa, Artificial Sequence
  Synthetic peptide
KTLNVPNEL

SEQ ID NO: 1246 - protein, 9 aa, Artificial Sequence
  Synthetic peptide
KVDEFYYKY

SEQ ID NO: 1247 - protein, 10 aa, Artificial Sequence
  Synthetic peptide
KANRERYNYF

SEQ ID NO: 1248 - protein, 9 aa, Artificial Sequence
  Synthetic peptide
KANRERYNY

SEQ ID NO: 1249 - protein, 10 aa, Artificial Sequence
  Synthetic peptide
KTLISEMMHY

SEQ ID NO: 1250 - protein, 9 aa, Artificial Sequence
  Synthetic peptide
KQEYFNFLM

SEQ ID NO: 1251 - protein, 10 aa, Artificial Sequence
  Synthetic peptide
KTQWVQTLKY

SEQ ID NO: 1252 - protein, 10 aa, Artificial Sequence
  Synthetic peptide
GTIFDETHFY

SEQ ID NO: 1253 - protein, 9 aa, Artificial Sequence
  Synthetic peptide
TIFDETHFY

SEQ ID NO: 1254 - protein, 10 aa, Artificial Sequence
  Synthetic peptide
RTDLNNCVSL

SEQ ID NO: 1255 - protein, 10 aa, Artificial Sequence
  Synthetic peptide
KKGRINRNYY

SEQ ID NO: 1256 - protein, 9 aa, Artificial Sequence
  Synthetic peptide
KKGRINRNY

SEQ ID NO: 1257 - protein, 9 aa, Artificial Sequence
  Synthetic peptide
KGRINRNYY

SEQ ID NO: 1258 - protein, 11 aa, Artificial Sequence
  Synthetic peptide
KGRINRNYYPY

SEQ ID NO: 1259 - protein, 8 aa, Artificial Sequence
  Synthetic peptide
KGRINRNY

SEQ ID NO: 1260 - protein, 10 aa, Artificial Sequence
  Synthetic peptide
GRINRNYYPY

SEQ ID NO: 1261 - protein, 11 aa, Artificial Sequence
  Synthetic peptide
GRINRNYYPYY

SEQ ID NO: 1262 - protein, 9 aa, Artificial Sequence
  Synthetic peptide
RINRNYYPY

SEQ ID NO: 1263 - protein, 10 aa, Artificial Sequence
  Synthetic peptide
RINRNYYPYY

SEQ ID NO: 1264 - protein, 11 aa, Artificial Sequence
  Synthetic peptide
RINRNYYPYYI

SEQ ID NO: 1265 - protein, 9 aa, Artificial Sequence
  Synthetic peptide
INRNYYPYY

SEQ ID NO: 1266 - protein, 10 aa, Artificial Sequence
  Synthetic peptide
INRNYYPYYI

SEQ ID NO: 1267 - protein, 8 aa, Artificial Sequence
  Synthetic peptide
INRNYYPY

SEQ ID NO: 1268 - protein, 11 aa, Artificial Sequence
  Synthetic peptide
INRNYYPYYIY

SEQ ID NO: 1269 - protein, 9 aa, Artificial Sequence
  Synthetic peptide
NRNYYPYYI

SEQ ID NO: 1270 - protein, 10 aa, Artificial Sequence
  Synthetic peptide
NRNYYPYYIY

SEQ ID NO: 1271 - protein, 11 aa, Artificial Sequence
  Synthetic peptide
NRNYYPYYIYK

SEQ ID NO: 1272 - protein, 8 aa, Artificial Sequence
  Synthetic peptide
NRNYYPYY

SEQ ID NO: 1273 - protein, 9 aa, Artificial Sequence
  Synthetic peptide
RNYYPYYIY

SEQ ID NO: 1274 - protein, 10 aa, Artificial Sequence
  Synthetic peptide
RNYYPYYIYK

SEQ ID NO: 1275 - protein, 8 aa, Artificial Sequence
  Synthetic peptide
RNYYPYYI

SEQ ID NO: 1276 - protein, 11 aa, Artificial Sequence
  Synthetic peptide
RNYYPYYIYKI

SEQ ID NO: 1277 - protein, 9 aa, Artificial Sequence
  Synthetic peptide
NYYPYYIYK

SEQ ID NO: 1278 - protein, 8 aa, Artificial Sequence
  Synthetic peptide
NYYPYYIY

SEQ ID NO: 1279 - protein, 9 aa, Artificial Sequence
  Synthetic peptide
YPYYIYKIF

SEQ ID NO: 1280 - protein, 9 aa, Artificial Sequence
  Synthetic peptide
YIYKIFDAI

SEQ ID NO: 1281 - protein, 9 aa, Artificial Sequence
  Synthetic peptide
TTNRRILQY

SEQ ID NO: 1282 - protein, 9 aa, Artificial Sequence
  Synthetic peptide
MASGGAFCL

SEQ ID NO: 1283 - protein, 9 aa, Artificial Sequence
  Synthetic peptide
ASGGAFCLI

SEQ ID NO: 1284 - protein, 9 aa, Artificial Sequence
  Synthetic peptide
AQDLLNSRI

SEQ ID NO: 1285 - protein, 9 aa, Artificial Sequence
  Synthetic peptide
SQIEETHLV

SEQ ID NO: 1286 - protein, 9 aa, Artificial Sequence
  Synthetic peptide
HLVHFNAHF

SEQ ID NO: 1287 - protein, 10 aa, Artificial Sequence
  Synthetic peptide
VHFNAHFKPY

SEQ ID NO: 1288 - protein, 9 aa, Artificial Sequence
  Synthetic peptide
HFNAHFKPY

SEQ ID NO: 1289 - protein, 10 aa, Artificial Sequence
  Synthetic peptide
KPYVPVGFEY

SEQ ID NO: 1290 - protein, 11 aa, Artificial Sequence
  Synthetic peptide
KVRPHTGTPTL

SEQ ID NO: 1291 - protein, 9 aa, Artificial Sequence
  Synthetic peptide
KLTFGIPQY

SEQ ID NO: 1292 - protein, 9 aa, Artificial Sequence
  Synthetic peptide
YGDFFHDMV

SEQ ID NO: 1293 - protein, 10 aa, Artificial Sequence
  Synthetic peptide
FHDMVGHHIL

SEQ ID NO: 1294 - protein, 9 aa, Artificial Sequence
  Synthetic peptide
HSSWQDAPI

SEQ ID NO: 1295 - protein, 9 aa, Artificial Sequence
  Synthetic peptide
SQMGAHGQL

SEQ ID NO: 1296 - protein, 9 aa, Artificial Sequence
  Synthetic peptide
HGQLQTFPR

SEQ ID NO: 1297 - protein, 10 aa, Artificial Sequence
  Synthetic peptide
QLQTFPRNGY

SEQ ID NO: 1298 - protein, 9 aa, Artificial Sequence
  Synthetic peptide
LQTFPRNGY

SEQ ID NO: 1299 - protein, 10 aa, Artificial Sequence
  Synthetic peptide
QTFPRNGYDW

SEQ ID NO: 1300 - protein, 9 aa, Artificial Sequence
  Synthetic peptide
YDWDNQTPL

SEQ ID NO: 1301 - protein, 9 aa, Artificial Sequence
  Synthetic peptide
AVYTLVDPF

SEQ ID NO: 1302 - protein, 9 aa, Artificial Sequence
  Synthetic peptide
LVDPFGRPI

SEQ ID NO: 1303 - protein, 10 aa, Artificial Sequence
  Synthetic peptide
TKNAYRNLVY

SEQ ID NO: 1304 - protein, 10 aa, Artificial Sequence
  Synthetic peptide
KNAYRNLVYY

SEQ ID NO: 1305 - protein, 9 aa, Artificial Sequence
  Synthetic peptide
KNAYRNLVY

SEQ ID NO: 1306 - protein, 9 aa, Artificial Sequence
  Synthetic peptide
NAYRNLVYY

SEQ ID NO: 1307 - protein, 10 aa, Artificial Sequence
  Synthetic peptide
YRNLVYYCEY

SEQ ID NO: 1308 - protein, 9 aa, Artificial Sequence
  Synthetic peptide
RNLVYYCEY

SEQ ID NO: 1309 - protein, 9 aa, Artificial Sequence
  Synthetic peptide
CEYPGERLY

SEQ ID NO: 1310 - protein, 9 aa, Artificial Sequence
  Synthetic peptide
RFDVNGNSL

SEQ ID NO: 1311 - protein, 10 aa, Artificial Sequence
  Synthetic peptide
DVNGNSLDEY

SEQ ID NO: 1312 - protein, 9 aa, Artificial Sequence
  Synthetic peptide
SLDEYSSDV

SEQ ID NO: 1313 - protein, 9 aa, Artificial Sequence
  Synthetic peptide
YSSDVTTLV

SEQ ID NO: 1314 - protein, 11 aa, Artificial Sequence
  Synthetic peptide
SSDVTTLVRKF

SEQ ID NO: 1315 - protein, 9 aa, Artificial Sequence
  Synthetic peptide
SVEGTSGPL

SEQ ID NO: 1316 - protein, 10 aa, Artificial Sequence
  Synthetic peptide
RTCSHTNPKF

SEQ ID NO: 1317 - protein, 9 aa, Artificial Sequence
  Synthetic peptide
RTCSHTNPK

SEQ ID NO: 1318 - protein, 9 aa, Artificial Sequence
  Synthetic peptide
ITPITDATY

SEQ ID NO: 1319 - protein, 9 aa, Artificial Sequence
  Synthetic peptide
ITDATYLDI

SEQ ID NO: 1320 - protein, 10 aa, Artificial Sequence
  Synthetic peptide
YLDIRRNVHY

SEQ ID NO: 1321 - protein, 9 aa, Artificial Sequence
  Synthetic peptide
KYYQPPLAL

SEQ ID NO: 1322 - protein, 9 aa, Artificial Sequence
  Synthetic peptide
YQPPLALWI

SEQ ID NO: 1323 - protein, 10 aa, Artificial Sequence
  Synthetic peptide
LAIPSVSIPF

SEQ ID NO: 1324 - protein, 9 aa, Artificial Sequence
  Synthetic peptide
AIPSVSIPF

SEQ ID NO: 1325 - protein, 10 aa, Artificial Sequence
  Synthetic peptide
SVSIPFGERF

SEQ ID NO: 1326 - protein, 9 aa, Artificial Sequence
  Synthetic peptide
VSIPFGERF

SEQ ID NO: 1327 - protein, 9 aa, Artificial Sequence
  Synthetic peptide
SQKDLVNEF

SEQ ID NO: 1328 - protein, 9 aa, Artificial Sequence
  Synthetic peptide
LVNEFPGLF

SEQ ID NO: 1329 - protein, 9 aa, Artificial Sequence
  Synthetic peptide
RQSRFIAGR

SEQ ID NO: 1330 - protein, 10 aa, Artificial Sequence
  Synthetic peptide
SRRNIRFKPW

SEQ ID NO: 1331 - protein, 10 aa, Artificial Sequence
  Synthetic peptide
RRNIRFKPWF

SEQ ID NO: 1332 - protein, 11 aa, Artificial Sequence
  Synthetic peptide
RRNIRFKPWFI

SEQ ID NO: 1333 - protein, 9 aa, Artificial Sequence
  Synthetic peptide
RNIRFKPWF

SEQ ID NO: 1334 - protein, 10 aa, Artificial Sequence
  Synthetic peptide
RNIRFKPWFI

SEQ ID NO: 1335 - protein, 8 aa, Artificial Sequence
  Synthetic peptide
RNIRFKPW

SEQ ID NO: 1336 - protein, 9 aa, Artificial Sequence
  Synthetic peptide
ISLTNNELY

SEQ ID NO: 1337 - protein, 10 aa, Artificial Sequence
  Synthetic peptide
ISLTNNELYI

SEQ ID NO: 1338 - protein, 9 aa, Artificial Sequence
  Synthetic peptide
SLTNNELYI

SEQ ID NO: 1339 - protein, 10 aa, Artificial Sequence
  Synthetic peptide
FVTPEIHNLF

SEQ ID NO: 1340 - protein, 9 aa, Artificial Sequence
  Synthetic peptide
FVTPEIHNL

SEQ ID NO: 1341 - protein, 9 aa, Artificial Sequence
  Synthetic peptide
VTPEIHNLF

SEQ ID NO: 1342 - protein, 9 aa, Artificial Sequence
  Synthetic peptide
FVKRVRFSL

SEQ ID NO: 1343 - protein, 8 aa, Artificial Sequence
  Synthetic peptide
KRVRFSLI

SEQ ID NO: 1344 - protein, 10 aa, Artificial Sequence
  Synthetic peptide
KRVRFSLIRV

SEQ ID NO: 1345 - protein, 9 aa, Artificial Sequence
  Synthetic peptide
RVRFSLIRV

SEQ ID NO: 1346 - protein, 10 aa, Artificial Sequence
  Synthetic peptide
KLMSALKWPI

SEQ ID NO: 1347 - protein, 9 aa, Artificial Sequence
  Synthetic peptide
LMSALKWPI

SEQ ID NO: 1348 - protein, 11 aa, Artificial Sequence
  Synthetic peptide
LMSALKWPIEY

SEQ ID NO: 1349 - protein, 10 aa, Artificial Sequence
  Synthetic peptide
MSALKWPIEY

SEQ ID NO: 1350 - protein, 8 aa, Artificial Sequence
  Synthetic peptide
MSALKWPI

SEQ ID NO: 1351 - protein, 9 aa, Artificial Sequence
  Synthetic peptide
SALKWPIEY

SEQ ID NO: 1352 - protein, 10 aa, Artificial Sequence
  Synthetic peptide
SALKWPIEYM

SEQ ID NO: 1353 - protein, 9 aa, Artificial Sequence
  Synthetic peptide
HQHRDWHKF

SEQ ID NO: 1354 - protein, 9 aa, Artificial Sequence
  Synthetic peptide
MQPTHHAEI

SEQ ID NO: 1355 - protein, 9 aa, Artificial Sequence
  Synthetic peptide
SSISDISPV

SEQ ID NO: 1356 - protein, 11 aa, Artificial Sequence
  Synthetic peptide
SSISDISPVTY

SEQ ID NO: 1357 - protein, 10 aa, Artificial Sequence
  Synthetic peptide
SISDISPVTY

SEQ ID NO: 1358 - protein, 9 aa, Artificial Sequence
  Synthetic peptide
ISDISPVTY

SEQ ID NO: 1359 - protein, 9 aa, Artificial Sequence
  Synthetic peptide
VTYPITLPI

SEQ ID NO: 1360 - protein, 9 aa, Artificial Sequence
  Synthetic peptide
SVTAHGINL

SEQ ID NO: 1361 - protein, 9 aa, Artificial Sequence
  Synthetic peptide
VTAHGINLI

SEQ ID NO: 1362 - protein, 10 aa, Artificial Sequence
  Synthetic peptide
NLIDKFPSKF

SEQ ID NO: 1363 - protein, 9 aa, Artificial Sequence
  Synthetic peptide
LIDKFPSKF

SEQ ID NO: 1364 - protein, 10 aa, Artificial Sequence
  Synthetic peptide
KFPSKFCSSY

SEQ ID NO: 1365 - protein, 9 aa, Artificial Sequence
  Synthetic peptide
FPSKFCSSY

SEQ ID NO: 1366 - protein, 10 aa, Artificial Sequence
  Synthetic peptide
SKFCSSYIPF

SEQ ID NO: 1367 - protein, 10 aa, Artificial Sequence
  Synthetic peptide
FCSSYIPFHY

SEQ ID NO: 1368 - protein, 9 aa, Artificial Sequence
  Synthetic peptide
CSSYIPFHY

SEQ ID NO: 1369 - protein, 10 aa, Artificial Sequence
  Synthetic peptide
KTPDDPGAMM

SEQ ID NO: 1370 - protein, 9 aa, Artificial Sequence
  Synthetic peptide
GAMMITFAL

SEQ ID NO: 1371 - protein, 9 aa, Artificial Sequence
  Synthetic peptide
FALKPREEY

SEQ ID NO: 1372 - protein, 9 aa, Artificial Sequence
  Synthetic peptide
NVSRAREFY

SEQ ID NO: 1373 - protein, 9 aa, Artificial Sequence
  Synthetic peptide
VSRAREFYI

SEQ ID NO: 1374 - protein, 10 aa, Artificial Sequence
  Synthetic peptide
SRAREFYISW

SEQ ID NO: 1375 - protein, 9 aa, Artificial Sequence
  Synthetic peptide
RAREFYISW

SEQ ID NO: 1376 - protein, 10 aa, Artificial Sequence
  Synthetic peptide
EFYISWDTDY

SEQ ID NO: 1377 - protein, 9 aa, Artificial Sequence
  Synthetic peptide
FYISWDTDY

SEQ ID NO: 1378 - protein, 9 aa, Artificial Sequence
  Synthetic peptide
YISWDTDYV

SEQ ID NO: 1379 - protein, 9 aa, Artificial Sequence
  Synthetic peptide
VVSASAINF

SEQ ID NO: 1380 - protein, 9 aa, Artificial Sequence
  Synthetic peptide
VSASAINFL

SEQ ID NO: 1381 - protein, 10 aa, Artificial Sequence
  Synthetic peptide
VSASAINFLL

SEQ ID NO: 1382 - protein, 9 aa, Artificial Sequence
  Synthetic peptide
SASAINFLL

SEQ ID NO: 1383 - protein, 10 aa, Artificial Sequence
  Synthetic peptide
SASAINFLLL

SEQ ID NO: 1384 - protein, 9 aa, Artificial Sequence
  Synthetic peptide
ASAINFLLL

SEQ ID NO: 1385 - protein, 8 aa, Artificial Sequence
  Synthetic peptide
ASAINFLL

SEQ ID NO: 1386 - protein, 9 aa, Artificial Sequence
  Synthetic peptide
LLQNGSAVL

SEQ ID NO: 1387 - protein, 10 aa, Artificial Sequence
  Synthetic peptide
LQNGSAVLRY

SEQ ID NO: 1388 - protein, 9 aa, Artificial Sequence
  Synthetic peptide
LVYELPAPF

SEQ ID NO: 1389 - protein, 9 aa, Artificial Sequence
  Synthetic peptide
ATSHVATSY

SEQ ID NO: 1390 - protein, 9 aa, Artificial Sequence
  Synthetic peptide
QQMLTRHIY

SEQ ID NO: 1391 - protein, 9 aa, Artificial Sequence
  Synthetic peptide
NLAGITTLM

SEQ ID NO: 1392 - protein, 10 aa, Artificial Sequence
  Synthetic peptide
RSNGDPNSFY

SEQ ID NO: 1393 - protein, 10 aa, Artificial Sequence
  Synthetic peptide
METNCPNILY

SEQ ID NO: 1394 - protein, 11 aa, Artificial Sequence
  Synthetic peptide
SSFKCWTCHLY

SEQ ID NO: 1395 - protein, 10 aa, Artificial Sequence
  Synthetic peptide
KTVPKFVPTY

SEQ ID NO: 1396 - protein, 9 aa, Artificial Sequence
  Synthetic peptide
TVPKFVPTY

SEQ ID NO: 1397 - protein, 9 aa, Artificial Sequence
  Synthetic peptide
CSFSCAASY

SEQ ID NO: 1398 - protein, 9 aa, Artificial Sequence
  Synthetic peptide
SAIEASILF

SEQ ID NO: 1399 - protein, 9 aa, Artificial Sequence
  Synthetic peptide
KTIMINFKF

SEQ ID NO: 1400 - protein, 10 aa, Artificial Sequence
  Synthetic peptide
KESAETIYTF

SEQ ID NO: 1401 - protein, 9 aa, Artificial Sequence
  Synthetic peptide
ESAETIYTF

SEQ ID NO: 1402 - protein, 10 aa, Artificial Sequence
  Synthetic peptide
LTNPLRVTLY

SEQ ID NO: 1403 - protein, 9 aa, Artificial Sequence
  Synthetic peptide
VMMPEIETM

SEQ ID NO: 1404 - protein, 9 aa, Artificial Sequence
  Synthetic peptide
MMPEIETMY

SEQ ID NO: 1405 - protein, 9 aa, Artificial Sequence
  Synthetic peptide
TMYSEYSIF

SEQ ID NO: 1406 - protein, 9 aa, Artificial Sequence
  Synthetic peptide
YVATGIPPY

SEQ ID NO: 1407 - protein, 9 aa, Artificial Sequence
  Synthetic peptide
IAIEDNYQF

SEQ ID NO: 1408 - protein, 9 aa, Artificial Sequence
  Synthetic peptide
RAQQVIAKY

SEQ ID NO: 1409 - protein, 9 aa, Artificial Sequence
  Synthetic peptide
SAMIKISPL

SEQ ID NO: 1410 - protein, 9 aa, Artificial Sequence
  Synthetic peptide
TIQNNGHYF

SEQ ID NO: 1411 - protein, 9 aa, Artificial Sequence
  Synthetic peptide
SVVSTLNNF

SEQ ID NO: 1412 - protein, 9 aa, Artificial Sequence
  Synthetic peptide
ISSMSVSTF

SEQ ID NO: 1413 - protein, 10 aa, Artificial Sequence
  Synthetic peptide
ISSMSVSTFW

SEQ ID NO: 1414 - protein, 9 aa, Artificial Sequence
  Synthetic peptide
SSMSVSTFW

SEQ ID NO: 1415 - protein, 11 aa, Artificial Sequence
  Synthetic peptide
SSMSVSTFWPY

SEQ ID NO: 1416 - protein, 10 aa, Artificial Sequence
  Synthetic peptide
SMSVSTFWPY

SEQ ID NO: 1417 - protein, 9 aa, Artificial Sequence
  Synthetic peptide
MSVSTFWPY

SEQ ID NO: 1418 - protein, 9 aa, Artificial Sequence
  Synthetic peptide
QTGVYNFLF

SEQ ID NO: 1419 - protein, 9 aa, Artificial Sequence
  Synthetic peptide
ALLQNTYAY

SEQ ID NO: 1420 - protein, 9 aa, Artificial Sequence
  Synthetic peptide
LQNTYAYLF

SEQ ID NO: 1421 - protein, 9 aa, Artificial Sequence
  Synthetic peptide
TQEEFNYLW

SEQ ID NO: 1422 - protein, 9 aa, Artificial Sequence
  Synthetic peptide
FTEGVPAYY

SEQ ID NO: 1423 - protein, 10 aa, Artificial Sequence
  Synthetic peptide
TQTSRHTLSY

SEQ ID NO: 1424 - protein, 9 aa, Artificial Sequence
  Synthetic peptide
QTSRHTLSY

SEQ ID NO: 1425 - protein, 9 aa, Artificial Sequence
  Synthetic peptide
GISNAGLFY

SEQ ID NO: 1426 - protein, 9 aa, Artificial Sequence
  Synthetic peptide
SNAGLFYSL

SEQ ID NO: 1427 - protein, 9 aa, Artificial Sequence
  Synthetic peptide
KAANTPQYY

SEQ ID NO: 1428 - protein, 10 aa, Artificial Sequence
  Synthetic peptide
KLINRHNFCY

SEQ ID NO: 1429 - protein, 9 aa, Artificial Sequence
  Synthetic peptide
LINRHNFCY

SEQ ID NO: 1430 - protein, 9 aa, Artificial Sequence
  Synthetic peptide
HNFCYALLI

SEQ ID NO: 1431 - protein, 9 aa, Artificial Sequence
  Synthetic peptide
ASFEETWKF

SEQ ID NO: 1432 - protein, 10 aa, Artificial Sequence
  Synthetic peptide
QQNKANKAFY

SEQ ID NO: 1433 - protein, 9 aa, Artificial Sequence
  Synthetic peptide
QQNKANKAF

SEQ ID NO: 1434 - protein, 11 aa, Artificial Sequence
  Synthetic peptide
QQNKANKAFYI

SEQ ID NO: 1435 - protein, 9 aa, Artificial Sequence
  Synthetic peptide
QNKANKAFY

SEQ ID NO: 1436 - protein, 9 aa, Artificial Sequence
  Synthetic peptide
NKANKAFYI

SEQ ID NO: 1437 - protein, 10 aa, Artificial Sequence
  Synthetic peptide
KANKAFYINH

SEQ ID NO: 1438 - protein, 8 aa, Artificial Sequence
  Synthetic peptide
KANKAFYI

SEQ ID NO: 1439 - protein, 11 aa, Artificial Sequence
  Synthetic peptide
KANKAFYINHL

SEQ ID NO: 1440 - protein, 11 aa, Artificial Sequence
  Synthetic peptide
ANKAFYINHLY

SEQ ID NO: 1441 - protein, 10 aa, Artificial Sequence
  Synthetic peptide
ANKAFYINHL

SEQ ID NO: 1442 - protein, 10 aa, Artificial Sequence
  Synthetic peptide
NKAFYINHLY

SEQ ID NO: 1443 - protein, 9 aa, Artificial Sequence
  Synthetic peptide
NKAFYINHL

SEQ ID NO: 1444 - protein, 11 aa, Artificial Sequence
  Synthetic peptide
NKAFYINHLYK

SEQ ID NO: 1445 - protein, 9 aa, Artificial Sequence
  Synthetic peptide
KAFYINHLY

SEQ ID NO: 1446 - protein, 11 aa, Artificial Sequence
  Synthetic peptide
KAFYINHLYKF

SEQ ID NO: 1447 - protein, 10 aa, Artificial Sequence
  Synthetic peptide
KAFYINHLYK

SEQ ID NO: 1448 - protein, 10 aa, Artificial Sequence
  Synthetic peptide
AFYINHLYKF

SEQ ID NO: 1449 - protein, 9 aa, Artificial Sequence
  Synthetic peptide
AFYINHLYK

SEQ ID NO: 1450 - protein, 8 aa, Artificial Sequence
  Synthetic peptide
AFYINHLY

SEQ ID NO: 1451 - protein, 9 aa, Artificial Sequence
  Synthetic peptide
FYINHLYKF

SEQ ID NO: 1452 - protein, 10 aa, Artificial Sequence
  Synthetic peptide
YINHLYKFLL

SEQ ID NO: 1453 - protein, 9 aa, Artificial Sequence
  Synthetic peptide
YINHLYKFL

SEQ ID NO: 1454 - protein, 9 aa, Artificial Sequence
  Synthetic peptide
INHLYKFLL

SEQ ID NO: 1455 - protein, 10 aa, Artificial Sequence
  Synthetic peptide
INHLYKFLLI

SEQ ID NO: 1456 - protein, 9 aa, Artificial Sequence
  Synthetic peptide
NHLYKFLLI

SEQ ID NO: 1457 - protein, 8 aa, Artificial Sequence
  Synthetic peptide
NHLYKFLL

SEQ ID NO: 1458 - protein, 10 aa, Artificial Sequence
  Synthetic peptide
HLYKFLLIEF

SEQ ID NO: 1459 - protein, 9 aa, Artificial Sequence
  Synthetic peptide
KITSVTEFY

SEQ ID NO: 1460 - protein, 9 aa, Artificial Sequence
  Synthetic peptide
SVTEFYTKL

SEQ ID NO: 1461 - protein, 10 aa, Artificial Sequence
  Synthetic peptide
YTLLSPLQSY

SEQ ID NO: 1462 - protein, 10 aa, Artificial Sequence
  Synthetic peptide
LLSPLQSYTY

SEQ ID NO: 1463 - protein, 9 aa, Artificial Sequence
  Synthetic peptide
LQTNAPLLF

SEQ ID NO: 1464 - protein, 9 aa, Artificial Sequence
  Synthetic peptide
QTNAPLLFM

SEQ ID NO: 1465 - protein, 9 aa, Artificial Sequence
  Synthetic peptide
LTQRPVMGY

SEQ ID NO: 1466 - protein, 11 aa, Artificial Sequence
  Synthetic peptide
KAITYLNNMGY

SEQ ID NO: 1467 - protein, 10 aa, Artificial Sequence
  Synthetic peptide
AITYLNNMGY

SEQ ID NO: 1468 - protein, 9 aa, Artificial Sequence
  Synthetic peptide
ITYLNNMGY

SEQ ID NO: 1469 - protein, 9 aa, Artificial Sequence
  Synthetic peptide
AADDTTCYY

SEQ ID NO: 1470 - protein, 9 aa, Artificial Sequence
  Synthetic peptide
KSSEWTTIL

SEQ ID NO: 1471 - protein, 9 aa, Artificial Sequence
  Synthetic peptide
MSLFWHQKL

SEQ ID NO: 1472 - protein, 9 aa, Artificial Sequence
  Synthetic peptide
KVDLPYHLM

SEQ ID NO: 1473 - protein, 9 aa, Artificial Sequence
  Synthetic peptide
GILSYTSLY

SEQ ID NO: 1474 - protein, 9 aa, Artificial Sequence
  Synthetic peptide
KVCNMLIAY

SEQ ID NO: 1475 - protein, 9 aa, Artificial Sequence
  Synthetic peptide
IAYAIHDEY

SEQ ID NO: 1476 - protein, 10 aa, Artificial Sequence
  Synthetic peptide
SLYPSLIMAY

SEQ ID NO: 1477 - protein, 10 aa, Artificial Sequence
  Synthetic peptide
MAYNFSPEKF

SEQ ID NO: 1478 - protein, 9 aa, Artificial Sequence
  Synthetic peptide
SLHYVSFHF

SEQ ID NO: 1479 - protein, 9 aa, Artificial Sequence
  Synthetic peptide
NNLSPFFLL

SEQ ID NO: 1480 - protein, 10 aa, Artificial Sequence
  Synthetic peptide
SGQYNLKLVY

SEQ ID NO: 1481 - protein, 9 aa, Artificial Sequence
  Synthetic peptide
GQYNLKLVY

SEQ ID NO: 1482 - protein, 10 aa, Artificial Sequence
  Synthetic peptide
SLYTEVTDAY

SEQ ID NO: 1483 - protein, 9 aa, Artificial Sequence
  Synthetic peptide
KTIKHYEQL

SEQ ID NO: 1484 - protein, 9 aa, Artificial Sequence
  Synthetic peptide
GTSYLRMAY

SEQ ID NO: 1485 - protein, 9 aa, Artificial Sequence
  Synthetic peptide
IAHVNTPNF

SEQ ID NO: 1486 - protein, 10 aa, Artificial Sequence
  Synthetic peptide
KNLPIDILFY

SEQ ID NO: 1487 - protein, 9 aa, Artificial Sequence
  Synthetic peptide
SFIQSTQFM

SEQ ID NO: 1488 - protein, 9 aa, Artificial Sequence
  Synthetic peptide
STQFMIQYF

SEQ ID NO: 1489 - protein, 9 aa, Artificial Sequence
  Synthetic peptide
HLQAFLDSY

SEQ ID NO: 1490 - protein, 10 aa, Artificial Sequence
  Synthetic peptide
RTFDHAKSLF

SEQ ID NO: 1491 - protein, 10 aa, Artificial Sequence
  Synthetic peptide
MIADAINQEF

SEQ ID NO: 1492 - protein, 9 aa, Artificial Sequence
  Synthetic peptide
IADAINQEF

SEQ ID NO: 1493 - protein, 10 aa, Artificial Sequence
  Synthetic peptide
ASICRQIVLY

SEQ ID NO: 1494 - protein, 9 aa, Artificial Sequence
  Synthetic peptide
YINSLTHGL

SEQ ID NO: 1495 - protein, 10 aa, Artificial Sequence
  Synthetic peptide
SLTHGLRAEY

SEQ ID NO: 1496 - protein, 9 aa, Artificial Sequence
  Synthetic peptide
LTHGLRAEY

SEQ ID NO: 1497 - protein, 9 aa, Artificial Sequence
  Synthetic peptide
KNFGKVLSY

SEQ ID NO: 1498 - protein, 9 aa, Artificial Sequence
  Synthetic peptide
VSAENIAEF

SEQ ID NO: 1499 - protein, 9 aa, Artificial Sequence
  Synthetic peptide
AVNLLRQTF

SEQ ID NO: 1500 - protein, 9 aa, Artificial Sequence
  Synthetic peptide
FLNKSTQAY

SEQ ID NO: 1501 - protein, 10 aa, Artificial Sequence
  Synthetic peptide
ALDLSLIGFY

SEQ ID NO: 1502 - protein, 10 aa, Artificial Sequence
  Synthetic peptide
KTDPNFKNLY

SEQ ID NO: 1503 - protein, 9 aa, Artificial Sequence
  Synthetic peptide
KTDPNFKNL

SEQ ID NO: 1504 - protein, 10 aa, Artificial Sequence
  Synthetic peptide
NQAINTFMYY

SEQ ID NO: 1505 - protein, 9 aa, Artificial Sequence
  Synthetic peptide
QAINTFMYY

SEQ ID NO: 1506 - protein, 9 aa, Artificial Sequence
  Synthetic peptide
AINTFMYYY

SEQ ID NO: 1507 - protein, 10 aa, Artificial Sequence
  Synthetic peptide
ATVSAIELEY

SEQ ID NO: 1508 - protein, 9 aa, Artificial Sequence
  Synthetic peptide
RALEGLDLY

SEQ ID NO: 1509 - protein, 9 aa, Artificial Sequence
  Synthetic peptide
TLAQVFESF

SEQ ID NO: 1510 - protein, 11 aa, Artificial Sequence
  Synthetic peptide
FTDNAPAGHYY

SEQ ID NO: 1511 - protein, 9 aa, Artificial Sequence
  Synthetic peptide
RSLSNFQAL

SEQ ID NO: 1512 - protein, 9 aa, Artificial Sequence
  Synthetic peptide
QIYKTLLEY

SEQ ID NO: 1513 - protein, 9 aa, Artificial Sequence
  Synthetic peptide
ETEDVFFTF

SEQ ID NO: 1514 - protein, 9 aa, Artificial Sequence
  Synthetic peptide
EAAELYFRL

SEQ ID NO: 1515 - protein, 9 aa, Artificial Sequence
  Synthetic peptide
RLAEFYQKL

SEQ ID NO: 1516 - protein, 10 aa, Artificial Sequence
  Synthetic peptide
VIYQHFNLEY

SEQ ID NO: 1517 - protein, 9 aa, Artificial Sequence
  Synthetic peptide
ATKKALIHF

SEQ ID NO: 1518 - protein, 9 aa, Artificial Sequence
  Synthetic peptide
RTMNDFGMM

SEQ ID NO: 1519 - protein, 9 aa, Artificial Sequence
  Synthetic peptide
FGMMNQTNY

SEQ ID NO: 1520 - protein, 9 aa, Artificial Sequence
  Synthetic peptide
MMNQTNYSI

SEQ ID NO: 1521 - protein, 9 aa, Artificial Sequence
  Synthetic peptide
TLFAWIVPY

SEQ ID NO: 1522 - protein, 9 aa, Artificial Sequence
  Synthetic peptide
NIFEMTSSF

SEQ ID NO: 1523 - protein, 9 aa, Artificial Sequence
  Synthetic peptide
STAQVHLDF

SEQ ID NO: 1524 - protein, 9 aa, Artificial Sequence
  Synthetic peptide
SLMADTKYF

SEQ ID NO: 1525 - protein, 10 aa, Artificial Sequence
  Synthetic peptide
NRSNPGSFYW

SEQ ID NO: 1526 - protein, 9 aa, Artificial Sequence
  Synthetic peptide
RSNPGSFYW

SEQ ID NO: 1527 - protein, 10 aa, Artificial Sequence
  Synthetic peptide
RSNPGSFYWL

SEQ ID NO: 1528 - protein, 10 aa, Artificial Sequence
  Synthetic peptide
KTYTLLTKPY

SEQ ID NO: 1529 - protein, 9 aa, Artificial Sequence
  Synthetic peptide
RVFSRLVFY

SEQ ID NO: 1530 - protein, 9 aa, Artificial Sequence
  Synthetic peptide
AQEENTLSY

SEQ ID NO: 1531 - protein, 10 aa, Artificial Sequence
  Synthetic peptide
MVFNQLIASY

SEQ ID NO: 1532 - protein, 10 aa, Artificial Sequence
  Synthetic peptide
FSQAVMEMGY

SEQ ID NO: 1533 - protein, 9 aa, Artificial Sequence
  Synthetic peptide
SQAVMEMGY

SEQ ID NO: 1534 - protein, 9 aa, Artificial Sequence
  Synthetic peptide
SAMEVLHEL

SEQ ID NO: 1535 - protein, 9 aa, Artificial Sequence
  Synthetic peptide
LMPFSLSLY

SEQ ID NO: 1536 - protein, 10 aa, Artificial Sequence
  Synthetic peptide
LMPFSLSLYY

SEQ ID NO: 1537 - protein, 10 aa, Artificial Sequence
  Synthetic peptide
SGSPEFKLLY

SEQ ID NO: 1538 - protein, 10 aa, Artificial Sequence
  Synthetic peptide
YTHAIQALRF

SEQ ID NO: 1539 - protein, 9 aa, Artificial Sequence
  Synthetic peptide
RSFKTVMMY

SEQ ID NO: 1540 - protein, 9 aa, Artificial Sequence
  Synthetic peptide
VMMYNENTF

SEQ ID NO: 1541 - protein, 9 aa, Artificial Sequence
  Synthetic peptide
NALMRSIPL

SEQ ID NO: 1542 - protein, 9 aa, Artificial Sequence
  Synthetic peptide
RSIPLANIY

SEQ ID NO: 1543 - protein, 9 aa, Artificial Sequence
  Synthetic peptide
NIYNYDYSF

SEQ ID NO: 1544 - protein, 10 aa, Artificial Sequence
  Synthetic peptide
GSLYPTQFDY

SEQ ID NO: 1545 - protein, 9 aa, Artificial Sequence
  Synthetic peptide
SLYPTQFDY

SEQ ID NO: 1546 - protein, 9 aa, Artificial Sequence
  Synthetic peptide
MSIYINQAL

SEQ ID NO: 1547 - protein, 9 aa, Artificial Sequence
  Synthetic peptide
AIQNWVQQY

SEQ ID NO: 1548 - protein, 9 aa, Artificial Sequence
  Synthetic peptide
AGAQLTALF

SEQ ID NO: 1549 - protein, 9 aa, Artificial Sequence
  Synthetic peptide
EAMQWFMTM

SEQ ID NO: 1550 - protein, 9 aa, Artificial Sequence
  Synthetic peptide
MVINHPPVL

SEQ ID NO: 1551 - protein, 9 aa, Artificial Sequence
  Synthetic peptide
YTENSVLTY

SEQ ID NO: 1552 - protein, 9 aa, Artificial Sequence
  Synthetic peptide
FILNISMKM

SEQ ID NO: 1553 - protein, 9 aa, Artificial Sequence
  Synthetic peptide
ISMKMEVIF

SEQ ID NO: 1554 - protein, 8 aa, Artificial Sequence
  Synthetic peptide
RSSSQVVF

SEQ ID NO: 1555 - protein, 11 aa, Artificial Sequence
  Synthetic peptide
SQVVFHAGSLY

SEQ ID NO: 1556 - protein, 10 aa, Artificial Sequence
  Synthetic peptide
QVVFHAGSLY

SEQ ID NO: 1557 - protein, 9 aa, Artificial Sequence
  Synthetic peptide
VVFHAGSLY

SEQ ID NO: 1558 - protein, 9 aa, Artificial Sequence
  Synthetic peptide
HAGSLYNWF

SEQ ID NO: 1559 - protein, 9 aa, Artificial Sequence
  Synthetic peptide
GSLYNWFSV

SEQ ID NO: 1560 - protein, 10 aa, Artificial Sequence
  Synthetic peptide
SLYNWFSVEI

SEQ ID NO: 1561 - protein, 9 aa, Artificial Sequence
  Synthetic peptide
SGRIVTTAI

SEQ ID NO: 1562 - protein, 9 aa, Artificial Sequence
  Synthetic peptide
VTTAIKTLL

SEQ ID NO: 1563 - protein, 9 aa, Artificial Sequence
  Synthetic peptide
KTLLSTVKY

SEQ ID NO: 1564 - protein, 11 aa, Artificial Sequence
  Synthetic peptide
KSARIYAGQGY

SEQ ID NO: 1565 - protein, 10 aa, Artificial Sequence
  Synthetic peptide
SARIYAGQGY

SEQ ID NO: 1566 - protein, 9 aa, Artificial Sequence
  Synthetic peptide
ARIYAGQGY

SEQ ID NO: 1567 - protein, 10 aa, Artificial Sequence
  Synthetic peptide
QAQEEWNMIL

SEQ ID NO: 1568 - protein, 9 aa, Artificial Sequence
  Synthetic peptide
AQEEWNMIL

SEQ ID NO: 1569 - protein, 9 aa, Artificial Sequence
  Synthetic peptide
ETNECTSSF

SEQ ID NO: 1570 - protein, 9 aa, Artificial Sequence
  Synthetic peptide
CTSSFETLF

SEQ ID NO: 1571 - protein, 9 aa, Artificial Sequence
  Synthetic peptide
KTVQHIEQY

SEQ ID NO: 1572 - protein, 9 aa, Artificial Sequence
  Synthetic peptide
EQYGKAPDF

SEQ ID NO: 1573 - protein, 9 aa, Artificial Sequence
  Synthetic peptide
KVIRAHNFI

SEQ ID NO: 1574 - protein, 10 aa, Artificial Sequence
  Synthetic peptide
IRAHNFIQTI

SEQ ID NO: 1575 - protein, 11 aa, Artificial Sequence
  Synthetic peptide
IRAHNFIQTIY

SEQ ID NO: 1576 - protein, 9 aa, Artificial Sequence
  Synthetic peptide
RAHNFIQTI

SEQ ID NO: 1577 - protein, 10 aa, Artificial Sequence
  Synthetic peptide
RAHNFIQTIY

SEQ ID NO: 1578 - protein, 9 aa, Artificial Sequence
  Synthetic peptide
AHNFIQTIY

SEQ ID NO: 1579 - protein, 9 aa, Artificial Sequence
  Synthetic peptide
RLMVIKLLK

SEQ ID NO: 1580 - protein, 9 aa, Artificial Sequence
  Synthetic peptide
SNMKQFCKI

SEQ ID NO: 1581 - protein, 10 aa, Artificial Sequence
  Synthetic peptide
MKQFCKISVW

SEQ ID NO: 1582 - protein, 9 aa, Artificial Sequence
  Synthetic peptide
KQFCKISVW

SEQ ID NO: 1583 - protein, 10 aa, Artificial Sequence
  Synthetic peptide
KQFCKISVWL

SEQ ID NO: 1584 - protein, 9 aa, Artificial Sequence
  Synthetic peptide
NNLCMLGNL

SEQ ID NO: 1585 - protein, 10 aa, Artificial Sequence
  Synthetic peptide
MLGNLSAAKY

SEQ ID NO: 1586 - protein, 10 aa, Artificial Sequence
  Synthetic peptide
AAKYKHGVTF

SEQ ID NO: 1587 - protein, 9 aa, Artificial Sequence
  Synthetic peptide
AKYKHGVTF

SEQ ID NO: 1588 - protein, 10 aa, Artificial Sequence
  Synthetic peptide
KYKHGVTFIY

SEQ ID NO: 1589 - protein, 10 aa, Artificial Sequence
  Synthetic peptide
KHGVTFIYPK

SEQ ID NO: 1590 - protein, 9 aa, Artificial Sequence
  Synthetic peptide
HGVTFIYPK

SEQ ID NO: 1591 - protein, 9 aa, Artificial Sequence
  Synthetic peptide
YSNDPSQAI

SEQ ID NO: 1592 - protein, 9 aa, Artificial Sequence
  Synthetic peptide
QAIKTLESL

SEQ ID NO: 1593 - protein, 10 aa, Artificial Sequence
  Synthetic peptide
KTLESLILPF

SEQ ID NO: 1594 - protein, 11 aa, Artificial Sequence
  Synthetic peptide
KTLESLILPFY

SEQ ID NO: 1595 - protein, 9 aa, Artificial Sequence
  Synthetic peptide
TLESLILPF

SEQ ID NO: 1596 - protein, 10 aa, Artificial Sequence
  Synthetic peptide
TLESLILPFY

SEQ ID NO: 1597 - protein, 9 aa, Artificial Sequence
  Synthetic peptide
FYIPTPAEF

SEQ ID NO: 1598 - protein, 9 aa, Artificial Sequence
  Synthetic peptide
KTEANKVIL

SEQ ID NO: 1599 - protein, 9 aa, Artificial Sequence
  Synthetic peptide
AVLVPAADF

SEQ ID NO: 1600 - protein, 8 aa, Artificial Sequence
  Synthetic peptide
RRLAVWIM

SEQ ID NO: 1601 - protein, 10 aa, Artificial Sequence
  Synthetic peptide
WIMESGSMPL

SEQ ID NO: 1602 - protein, 9 aa, Artificial Sequence
  Synthetic peptide
IMESGSMPL

SEQ ID NO: 1603 - protein, 10 aa, Artificial Sequence
  Synthetic peptide
GSMPLEGPPY

SEQ ID NO: 1604 - protein, 9 aa, Artificial Sequence
  Synthetic peptide
SMPLEGPPY

SEQ ID NO: 1605 - protein, 11 aa, Artificial Sequence
  Synthetic peptide
KAFDDCMRQNW

SEQ ID NO: 1606 - protein, 11 aa, Artificial Sequence
  Synthetic peptide
RQNWCSVNNPY

SEQ ID NO: 1607 - protein, 9 aa, Artificial Sequence
  Synthetic peptide
SVNNPYLAK

SEQ ID NO: 1608 - protein, 9 aa, Artificial Sequence
  Synthetic peptide
YLAKSVSLL

SEQ ID NO: 1609 - protein, 9 aa, Artificial Sequence
  Synthetic peptide
KSVSLLSFL

SEQ ID NO: 1610 - protein, 11 aa, Artificial Sequence
  Synthetic peptide
KSVSLLSFLSL

SEQ ID NO: 1611 - protein, 8 aa, Artificial Sequence
  Synthetic peptide
KSVSLLSF

SEQ ID NO: 1612 - protein, 10 aa, Artificial Sequence
  Synthetic peptide
SVSLLSFLSL

SEQ ID NO: 1613 - protein, 9 aa, Artificial Sequence
  Synthetic peptide
VSLLSFLSL

SEQ ID NO: 1614 - protein, 10 aa, Artificial Sequence
  Synthetic peptide
FLSLNHPTEF

SEQ ID NO: 1615 - protein, 9 aa, Artificial Sequence
  Synthetic peptide
LSLNHPTEF

SEQ ID NO: 1616 - protein, 9 aa, Artificial Sequence
  Synthetic peptide
SLNHPTEFI

SEQ ID NO: 1617 - protein, 10 aa, Artificial Sequence
  Synthetic peptide
LIDFDPLVTF

SEQ ID NO: 1618 - protein, 11 aa, Artificial Sequence
  Synthetic peptide
LIDFDPLVTFY

SEQ ID NO: 1619 - protein, 10 aa, Artificial Sequence
  Synthetic peptide
IDFDPLVTFY

SEQ ID NO: 1620 - protein, 9 aa, Artificial Sequence
  Synthetic peptide
DFDPLVTFY

SEQ ID NO: 1621 - protein, 10 aa, Artificial Sequence
  Synthetic peptide
VTFYLLLEPY

SEQ ID NO: 1622 - protein, 9 aa, Artificial Sequence
  Synthetic peptide
TFYLLLEPY

SEQ ID NO: 1623 - protein, 9 aa, Artificial Sequence
  Synthetic peptide
KTHGDDFLI

SEQ ID NO: 1624 - protein, 9 aa, Artificial Sequence
  Synthetic peptide
FLIPETILF

SEQ ID NO: 1625 - protein, 9 aa, Artificial Sequence
  Synthetic peptide
TILFGPTGW

SEQ ID NO: 1626 - protein, 9 aa, Artificial Sequence
  Synthetic peptide
TGWNGTDLY

SEQ ID NO: 1627 - protein, 9 aa, Artificial Sequence
  Synthetic peptide
GTDLYQSAM

SEQ ID NO: 1628 - protein, 9 aa, Artificial Sequence
  Synthetic peptide
SAMLEFKKF

SEQ ID NO: 1629 - protein, 10 aa, Artificial Sequence
  Synthetic peptide
SAMLEFKKFF

SEQ ID NO: 1630 - protein, 9 aa, Artificial Sequence
  Synthetic peptide
AMLEFKKFF

SEQ ID NO: 1631 - protein, 9 aa, Artificial Sequence
  Synthetic peptide
FTQITRQTF

SEQ ID NO: 1632 - protein, 9 aa, Artificial Sequence
  Synthetic peptide
TQITRQTFM

SEQ ID NO: 1633 - protein, 9 aa, Artificial Sequence
  Synthetic peptide
ITRQTFMDI

SEQ ID NO: 1634 - protein, 9 aa, Artificial Sequence
  Synthetic peptide
IADSATKEV

SEQ ID NO: 1635 - protein, 9 aa, Artificial Sequence
  Synthetic peptide
ATKEVDVPI

SEQ ID NO: 1636 - protein, 10 aa, Artificial Sequence
  Synthetic peptide
YSDPETVHSY

SEQ ID NO: 1637 - protein, 9 aa, Artificial Sequence
  Synthetic peptide
YANHVRTEI

SEQ ID NO: 1638 - protein, 10 aa, Artificial Sequence
  Synthetic peptide
TTPNLVVQAY

SEQ ID NO: 1639 - protein, 9 aa, Artificial Sequence
  Synthetic peptide
NTIRHYGPI

SEQ ID NO: 1640 - protein, 9 aa, Artificial Sequence
  Synthetic peptide
ESTINALRF

SEQ ID NO: 1641 - protein, 9 aa, Artificial Sequence
  Synthetic peptide
STINALRFW

SEQ ID NO: 1642 - protein, 10 aa, Artificial Sequence
  Synthetic peptide
STINALRFWK

SEQ ID NO: 1643 - protein, 9 aa, Artificial Sequence
  Synthetic peptide
INALRFWKK

SEQ ID NO: 1644 - protein, 9 aa, Artificial Sequence
  Synthetic peptide
KLWQDEQRF

SEQ ID NO: 1645 - protein, 9 aa, Artificial Sequence
  Synthetic peptide
WQDEQRFVI

SEQ ID NO: 1646 - protein, 9 aa, Artificial Sequence
  Synthetic peptide
EQRFVIHGL

SEQ ID NO: 1647 - protein, 10 aa, Artificial Sequence
  Synthetic peptide
HRTLMDQPTY

SEQ ID NO: 1648 - protein, 9 aa, Artificial Sequence
  Synthetic peptide
RTLMDQPTY

SEQ ID NO: 1649 - protein, 8 aa, Artificial Sequence
  Synthetic peptide
TLMDQPTY

SEQ ID NO: 1650 - protein, 9 aa, Artificial Sequence
  Synthetic peptide
RNLRFSRPG

SEQ ID NO: 1651 - protein, 9 aa, Artificial Sequence
  Synthetic peptide
RFSRPGNNY

SEQ ID NO: 1652 - protein, 10 aa, Artificial Sequence
  Synthetic peptide
RFSRPGNNYI

SEQ ID NO: 1653 - protein, 9 aa, Artificial Sequence
  Synthetic peptide
FSRPGNNYI

SEQ ID NO: 1654 - protein, 9 aa, Artificial Sequence
  Synthetic peptide
ELNITSPAM

SEQ ID NO: 1655 - protein, 10 aa, Artificial Sequence
  Synthetic peptide
ELNITSPAMY

SEQ ID NO: 1656 - protein, 9 aa, Artificial Sequence
  Synthetic peptide
VAFINSTDF

SEQ ID NO: 1657 - protein, 11 aa, Artificial Sequence
  Synthetic peptide
VAFINSTDFLY

SEQ ID NO: 1658 - protein, 10 aa, Artificial Sequence
  Synthetic peptide
AFINSTDFLY

SEQ ID NO: 1659 - protein, 9 aa, Artificial Sequence
  Synthetic peptide
FINSTDFLY

SEQ ID NO: 1660 - protein, 9 aa, Artificial Sequence
  Synthetic peptide
STDFLYTAI

SEQ ID NO: 1661 - protein, 10 aa, Artificial Sequence
  Synthetic peptide
SLTDLVPTRL

SEQ ID NO: 1662 - protein, 9 aa, Artificial Sequence
  Synthetic peptide
LTDLVPTRL

SEQ ID NO: 1663 - protein, 10 aa, Artificial Sequence
  Synthetic peptide
RLHSFLNHNL

SEQ ID NO: 1664 - protein, 9 aa, Artificial Sequence
  Synthetic peptide
LHSFLNHNL

SEQ ID NO: 1665 - protein, 10 aa, Artificial Sequence
  Synthetic peptide
HSFLNHNLSK

SEQ ID NO: 1666 - protein, 9 aa, Artificial Sequence
  Synthetic peptide
FLNHNLSKL

SEQ ID NO: 1667 - protein, 10 aa, Artificial Sequence
  Synthetic peptide
RAQQTVRNIL

SEQ ID NO: 1668 - protein, 9 aa, Artificial Sequence
  Synthetic peptide
RAQQTVRNI

SEQ ID NO: 1669 - protein, 9 aa, Artificial Sequence
  Synthetic peptide
RNILSNDCL

SEQ ID NO: 1670 - protein, 10 aa, Artificial Sequence
  Synthetic peptide
RTHLITTLDY

SEQ ID NO: 1671 - protein, 9 aa, Artificial Sequence
  Synthetic peptide
TTLDYRKYY

SEQ ID NO: 1672 - protein, 9 aa, Artificial Sequence
  Synthetic peptide
SNMGISFPL

SEQ ID NO: 1673 - protein, 9 aa, Artificial Sequence
  Synthetic peptide
MGISFPLCL

SEQ ID NO: 1674 - protein, 9 aa, Artificial Sequence
  Synthetic peptide
ISFPLCLEM

SEQ ID NO: 1675 - protein, 9 aa, Artificial Sequence
  Synthetic peptide
MLNDVDLLI

SEQ ID NO: 1676 - protein, 10 aa, Artificial Sequence
  Synthetic peptide
VVIMAIMLYY

SEQ ID NO: 1677 - protein, 9 aa, Artificial Sequence
  Synthetic peptide
VVIMAIMLY

SEQ ID NO: 1678 - protein, 9 aa, Artificial Sequence
  Synthetic peptide
VIMAIMLYY

SEQ ID NO: 1679 - protein, 9 aa, Artificial Sequence
  Synthetic peptide
MAIMLYYFW

SEQ ID NO: 1680 - protein, 10 aa, Artificial Sequence
  Synthetic peptide
MHAPVLQPLF

SEQ ID NO: 1681 - protein, 10 aa, Artificial Sequence
  Synthetic peptide
RNLQTIQQLY

SEQ ID NO: 1682 - protein, 9 aa, Artificial Sequence
  Synthetic peptide
NLQTIQQLY

SEQ ID NO: 1683 - protein, 9 aa, Artificial Sequence
  Synthetic peptide
YNINRLMPY

SEQ ID NO: 1684 - protein, 10 aa, Artificial Sequence
  Synthetic peptide
YNINRLMPYF

SEQ ID NO: 1685 - protein, 9 aa, Artificial Sequence
  Synthetic peptide
NINRLMPYF

SEQ ID NO: 1686 - protein, 10 aa, Artificial Sequence
  Synthetic peptide
RQYPGCSRVY

SEQ ID NO: 1687 - protein, 10 aa, Artificial Sequence
  Synthetic peptide
FQMNVSACAW

SEQ ID NO: 1688 - protein, 10 aa, Artificial Sequence
  Synthetic peptide
QMNVSACAWY

SEQ ID NO: 1689 - protein, 9 aa, Artificial Sequence
  Synthetic peptide
MNLWVPWSV

SEQ ID NO: 1690 - protein, 9 aa, Artificial Sequence
  Synthetic peptide
NVMNKLHAM

SEQ ID NO: 1691 - protein, 9 aa, Artificial Sequence
  Synthetic peptide
YSEVYAPYM

SEQ ID NO: 1692 - protein, 10 aa, Artificial Sequence
  Synthetic peptide
SEVYAPYMHY

SEQ ID NO: 1693 - protein, 9 aa, Artificial Sequence
  Synthetic peptide
EVYAPYMHY

SEQ ID NO: 1694 - protein, 9 aa, Artificial Sequence
  Synthetic peptide
ATQQLALNY

SEQ ID NO: 1695 - protein, 10 aa, Artificial Sequence
  Synthetic peptide
QFSFGRTLVY

SEQ ID NO: 1696 - protein, 9 aa, Artificial Sequence
  Synthetic peptide
FSFGRTLVY

SEQ ID NO: 1697 - protein, 10 aa, Artificial Sequence
  Synthetic peptide
FSFGRTLVYY

SEQ ID NO: 1698 - protein, 9 aa, Artificial Sequence
  Synthetic peptide
RTLVYYPRF

SEQ ID NO: 1699 - protein, 9 aa, Artificial Sequence
  Synthetic peptide
ALSTSSTGY

SEQ ID NO: 1700 - protein, 9 aa, Artificial Sequence
  Synthetic peptide
LQSCIVDYY

SEQ ID NO: 1701 - protein, 9 aa, Artificial Sequence
  Synthetic peptide
YTGIQSPLF

SEQ ID NO: 1702 - protein, 9 aa, Artificial Sequence
  Synthetic peptide
SSTSGVLPF

SEQ ID NO: 1703 - protein, 11 aa, Artificial Sequence
  Synthetic peptide
MVKTFCKNLPY

SEQ ID NO: 1704 - protein, 10 aa, Artificial Sequence
  Synthetic peptide
VKTFCKNLPY

SEQ ID NO: 1705 - protein, 9 aa, Artificial Sequence
  Synthetic peptide
KTFCKNLPY

SEQ ID NO: 1706 - protein, 9 aa, Artificial Sequence
  Synthetic peptide
RLQTPIPVY

SEQ ID NO: 1707 - protein, 9 aa, Artificial Sequence
  Synthetic peptide
SVSEPLTQY

SEQ ID NO: 1708 - protein, 9 aa, Artificial Sequence
  Synthetic peptide
RIYLRESAF

SEQ ID NO: 1709 - protein, 9 aa, Artificial Sequence
  Synthetic peptide
STIRGIPGI

SEQ ID NO: 1710 - protein, 9 aa, Artificial Sequence
  Synthetic peptide
YGIAAPTLM

SEQ ID NO: 1711 - protein, 9 aa, Artificial Sequence
  Synthetic peptide
MLNQFPGQY

SEQ ID NO: 1712 - protein, 9 aa, Artificial Sequence
  Synthetic peptide
NNIFCFPPI

SEQ ID NO: 1713 - protein, 9 aa, Artificial Sequence
  Synthetic peptide
TIIPITDEM

SEQ ID NO: 1714 - protein, 9 aa, Artificial Sequence
  Synthetic peptide
AVAEIFTKF

SEQ ID NO: 1715 - protein, 9 aa, Artificial Sequence
  Synthetic peptide
ATTVVHQAF

SEQ ID NO: 1716 - protein, 9 aa, Artificial Sequence
  Synthetic peptide
RVYLDGELY

SEQ ID NO: 1717 - protein, 9 aa, Artificial Sequence
  Synthetic peptide
KTDSSELHF

SEQ ID NO: 1718 - protein, 9 aa, Artificial Sequence
  Synthetic peptide
SSELHFYVF

SEQ ID NO: 1719 - protein, 9 aa, Artificial Sequence
  Synthetic peptide
KAQFIKEGY

SEQ ID NO: 1720 - protein, 9 aa, Artificial Sequence
  Synthetic peptide
VVTPKHLTY

SEQ ID NO: 1721 - protein, 10 aa, Artificial Sequence
  Synthetic peptide
LTYADRYALF

SEQ ID NO: 1722 - protein, 10 aa, Artificial Sequence
  Synthetic peptide
ASLDNLVARY

SEQ ID NO: 1723 - protein, 9 aa, Artificial Sequence
  Synthetic peptide
SLDNLVARY

SEQ ID NO: 1724 - protein, 9 aa, Artificial Sequence
  Synthetic peptide
STIELEIRF

SEQ ID NO: 1725 - protein, 9 aa, Artificial Sequence
  Synthetic peptide
LAAFKTLLF

SEQ ID NO: 1726 - protein, 9 aa, Artificial Sequence
  Synthetic peptide
TLISPNHLM

SEQ ID NO: 1727 - protein, 9 aa, Artificial Sequence
  Synthetic peptide
TAYHQAIEF

SEQ ID NO: 1728 - protein, 9 aa, Artificial Sequence
  Synthetic peptide
KSMTKADYM

SEQ ID NO: 1729 - protein, 9 aa, Artificial Sequence
  Synthetic peptide
MTKADYMKF

SEQ ID NO: 1730 - protein, 11 aa, Artificial Sequence
  Synthetic peptide
YMKFYPPVGYY

SEQ ID NO: 1731 - protein, 9 aa, Artificial Sequence
  Synthetic peptide
KFYPPVGYY

SEQ ID NO: 1732 - protein, 9 aa, Artificial Sequence
  Synthetic peptide
NSYLNTNTF

SEQ ID NO: 1733 - protein, 9 aa, Artificial Sequence
  Synthetic peptide
YLNTNTFKW

SEQ ID NO: 1734 - protein, 9 aa, Artificial Sequence
  Synthetic peptide
NTFKWKPTW

SEQ ID NO: 1735 - protein, 9 aa, Artificial Sequence
  Synthetic peptide
KGFSLHLLF

SEQ ID NO: 1736 - protein, 9 aa, Artificial Sequence
  Synthetic peptide
VTQRNQNYF

SEQ ID NO: 1737 - protein, 9 aa, Artificial Sequence
  Synthetic peptide
NQNYFPVQF

SEQ ID NO: 1738 - protein, 10 aa, Artificial Sequence
  Synthetic peptide
KTAELTWLNY

SEQ ID NO: 1739 - protein, 10 aa, Artificial Sequence
  Synthetic peptide
YMDPFSFEEL

SEQ ID NO: 1740 - protein, 9 aa, Artificial Sequence
  Synthetic peptide
RAQTALISF

SEQ ID NO: 1741 - protein, 9 aa, Artificial Sequence
  Synthetic peptide
ASSIVSNLF

SEQ ID NO: 1742 - protein, 9 aa, Artificial Sequence
  Synthetic peptide
IVSNLFIHY

SEQ ID NO: 1743 - protein, 9 aa, Artificial Sequence
  Synthetic peptide
SNLFIHYLM

SEQ ID NO: 1744 - protein, 10 aa, Artificial Sequence
  Synthetic peptide
QSFKDWIPEF

SEQ ID NO: 1745 - protein, 9 aa, Artificial Sequence
  Synthetic peptide
SFKDWIPEF

SEQ ID NO: 1746 - protein, 9 aa, Artificial Sequence
  Synthetic peptide
FQNFSKSLY

SEQ ID NO: 1747 - protein, 9 aa, Artificial Sequence
  Synthetic peptide
KTWTSLFGF

SEQ ID NO: 1748 - protein, 10 aa, Artificial Sequence
  Synthetic peptide
KTLDFDRMWY

SEQ ID NO: 1749 - protein, 9 aa, Artificial Sequence
  Synthetic peptide
TLDFDRMWY

SEQ ID NO: 1750 - protein, 11 aa, Artificial Sequence
  Synthetic peptide
SMSYFDGKTEY

SEQ ID NO: 1751 - protein, 10 aa, Artificial Sequence
  Synthetic peptide
MSYFDGKTEY

SEQ ID NO: 1752 - protein, 9 aa, Artificial Sequence
  Synthetic peptide
KTEYKHIYF

SEQ ID NO: 1753 - protein, 9 aa, Artificial Sequence
  Synthetic peptide
YFDTFANAM

SEQ ID NO: 1754 - protein, 9 aa, Artificial Sequence
  Synthetic peptide
FANAMQAYL

SEQ ID NO: 1755 - protein, 9 aa, Artificial Sequence
  Synthetic peptide
KTIEYQKEF

SEQ ID NO: 1756 - protein, 9 aa, Artificial Sequence
  Synthetic peptide
RTNNSGRGY

SEQ ID NO: 1757 - protein, 10 aa, Artificial Sequence
  Synthetic peptide
HVRFSAVVSY

SEQ ID NO: 1758 - protein, 9 aa, Artificial Sequence
  Synthetic peptide
AVVSYLNAF

SEQ ID NO: 1759 - protein, 10 aa, Artificial Sequence
  Synthetic peptide
VQLANSSVYY

SEQ ID NO: 1760 - protein, 9 aa, Artificial Sequence
  Synthetic peptide
QLANSSVYY

SEQ ID NO: 1761 - protein, 9 aa, Artificial Sequence
  Synthetic peptide
SVYHVQEEL

SEQ ID NO: 1762 - protein, 9 aa, Artificial Sequence
  Synthetic peptide
RAFFPCDPY

SEQ ID NO: 1763 - protein, 10 aa, Artificial Sequence
  Synthetic peptide
AIARQFMNHY

SEQ ID NO: 1764 - protein, 10 aa, Artificial Sequence
  Synthetic peptide
YMNFIENAPW

SEQ ID NO: 1765 - protein, 9 aa, Artificial Sequence
  Synthetic peptide
IADEIHNVY

SEQ ID NO: 1766 - protein, 9 aa, Artificial Sequence
  Synthetic peptide
SVMEYVDLL

SEQ ID NO: 1767 - protein, 9 aa, Artificial Sequence
  Synthetic peptide
LLDTNTNFY

SEQ ID NO: 1768 - protein, 10 aa, Artificial Sequence
  Synthetic peptide
RIFAGKMLSY

SEQ ID NO: 1769 - protein, 10 aa, Artificial Sequence
  Synthetic peptide
KISSNAYSIY

SEQ ID NO: 1770 - protein, 9 aa, Artificial Sequence
  Synthetic peptide
ISSNAYSIY

SEQ ID NO: 1771 - protein, 9 aa, Artificial Sequence
  Synthetic peptide
SMASTDWLL

SEQ ID NO: 1772 - protein, 9 aa, Artificial Sequence
  Synthetic peptide
NVSGSFLSL

SEQ ID NO: 1773 - protein, 10 aa, Artificial Sequence
  Synthetic peptide
SGLAFYSGKY

SEQ ID NO: 1774 - protein, 10 aa, Artificial Sequence
  Synthetic peptide
AVRERSLALF

SEQ ID NO: 1775 - protein, 9 aa, Artificial Sequence
  Synthetic peptide
YEMIMSLPL

SEQ ID NO: 1776 - protein, 10 aa, Artificial Sequence
  Synthetic peptide
ATVLNTFEAY

SEQ ID NO: 1777 - protein, 9 aa, Artificial Sequence
  Synthetic peptide
TVLNTFEAY

SEQ ID NO: 1778 - protein, 9 aa, Artificial Sequence
  Synthetic peptide
ISNIIISLF

SEQ ID NO: 1779 - protein, 9 aa, Artificial Sequence
  Synthetic peptide
SLFMARPVW

SEQ ID NO: 1780 - protein, 9 aa, Artificial Sequence
  Synthetic peptide
FMARPVWTY

SEQ ID NO: 1781 - protein, 10 aa, Artificial Sequence
  Synthetic peptide
LIHYPASFHY

SEQ ID NO: 1782 - protein, 9 aa, Artificial Sequence
  Synthetic peptide
KTWHEIPLY

SEQ ID NO: 1783 - protein, 10 aa, Artificial Sequence
  Synthetic peptide
GMQDGIRWFY

SEQ ID NO: 1784 - protein, 10 aa, Artificial Sequence
  Synthetic peptide
MQDGIRWFYL

SEQ ID NO: 1785 - protein, 9 aa, Artificial Sequence
  Synthetic peptide
MQDGIRWFY

SEQ ID NO: 1786 - protein, 11 aa, Artificial Sequence
  Synthetic peptide
MQDGIRWFYLF

SEQ ID NO: 1787 - protein, 9 aa, Artificial Sequence
  Synthetic peptide
DGIRWFYLF

SEQ ID NO: 1788 - protein, 9 aa, Artificial Sequence
  Synthetic peptide
TQGLLAHTI

SEQ ID NO: 1789 - protein, 10 aa, Artificial Sequence
  Synthetic peptide
GLLAHTIAKY

SEQ ID NO: 1790 - protein, 9 aa, Artificial Sequence
  Synthetic peptide
LLAHTIAKY

SEQ ID NO: 1791 - protein, 9 aa, Artificial Sequence
  Synthetic peptide
RTIDCKSSI

SEQ ID NO: 1792 - protein, 10 aa, Artificial Sequence
  Synthetic peptide
SSIPKPPPSY

SEQ ID NO: 1793 - protein, 11 aa, Artificial Sequence
  Synthetic peptide
SSIPKPPPSYY

SEQ ID NO: 1794 - protein, 9 aa, Artificial Sequence
  Synthetic peptide
SIPKPPPSY

SEQ ID NO: 1795 - protein, 10 aa, Artificial Sequence
  Synthetic peptide
SIPKPPPSYY

SEQ ID NO: 1796 - protein, 9 aa, Artificial Sequence
  Synthetic peptide
HHHFPVFFR

SEQ ID NO: 1797 - protein, 9 aa, Artificial Sequence
  Synthetic peptide
HHFPVFFRK

SEQ ID NO: 1798 - protein, 9 aa, Artificial Sequence
  Synthetic peptide
RKRKNSTSL

SEQ ID NO: 1799 - protein, 10 aa, Artificial Sequence
  Synthetic peptide
MAMQKLFTYI

SEQ ID NO: 1800 - protein, 9 aa, Artificial Sequence
  Synthetic peptide
MAMQKLFTY

SEQ ID NO: 1801 - protein, 10 aa, Artificial Sequence
  Synthetic peptide
AMQKLFTYIY

SEQ ID NO: 1802 - protein, 9 aa, Artificial Sequence
  Synthetic peptide
KLFTYIYEF

SEQ ID NO: 1803 - protein, 9 aa, Artificial Sequence
  Synthetic peptide
ASVLGLNPY

SEQ ID NO: 1804 - protein, 10 aa, Artificial Sequence
  Synthetic peptide
LGLNPYKSYY

SEQ ID NO: 1805 - protein, 9 aa, Artificial Sequence
  Synthetic peptide
GLNPYKSYY

SEQ ID NO: 1806 - protein, 10 aa, Artificial Sequence
  Synthetic peptide
RAACSWGTLF

SEQ ID NO: 1807 - protein, 9 aa, Artificial Sequence
  Synthetic peptide
AACSWGTLF

SEQ ID NO: 1808 - protein, 9 aa, Artificial Sequence
  Synthetic peptide
HIDGTYLGY

SEQ ID NO: 1809 - protein, 9 aa, Artificial Sequence
  Synthetic peptide
QSWEIKTIF

SEQ ID NO: 1810 - protein, 9 aa, Artificial Sequence
  Synthetic peptide
KTIFNNVRY

SEQ ID NO: 1811 - protein, 9 aa, Artificial Sequence
  Synthetic peptide
KIKNSVPSY

SEQ ID NO: 1812 - protein, 10 aa, Artificial Sequence
  Synthetic peptide
KIKNSVPSYY

SEQ ID NO: 1813 - protein, 10 aa, Artificial Sequence
  Synthetic peptide
QYTIHYSMPY

SEQ ID NO: 1814 - protein, 9 aa, Artificial Sequence
  Synthetic peptide
YTIHYSMPY

SEQ ID NO: 1815 - protein, 9 aa, Artificial Sequence
  Synthetic peptide
KASPSPMEM

SEQ ID NO: 1816 - protein, 9 aa, Artificial Sequence
  Synthetic peptide
YSLNNWARY

SEQ ID NO: 1817 - protein, 10 aa, Artificial Sequence
  Synthetic peptide
SVNYYPHCEY

SEQ ID NO: 1818 - protein, 10 aa, Artificial Sequence
  Synthetic peptide
NQAFEHLYAF

SEQ ID NO: 1819 - protein, 9 aa, Artificial Sequence
  Synthetic peptide
QAFEHLYAF

SEQ ID NO: 1820 - protein, 10 aa, Artificial Sequence
  Synthetic peptide
RQLEKKMYGY

SEQ ID NO: 1821 - protein, 9 aa, Artificial Sequence
  Synthetic peptide
KLQTVLTFY

SEQ ID NO: 1822 - protein, 9 aa, Artificial Sequence
  Synthetic peptide
TLQRWAIKY

SEQ ID NO: 1823 - protein, 9 aa, Artificial Sequence
  Synthetic peptide
YTKFFNCPF

SEQ ID NO: 1824 - protein, 10 aa, Artificial Sequence
  Synthetic peptide
SMMDFERVHY

SEQ ID NO: 1825 - protein, 9 aa, Artificial Sequence
  Synthetic peptide
MMDFERVHY

SEQ ID NO: 1826 - protein, 10 aa, Artificial Sequence
  Synthetic peptide
MRGDCWSIEY

SEQ ID NO: 1827 - protein, 9 aa, Artificial Sequence
  Synthetic peptide
RGDCWSIEY

SEQ ID NO: 1828 - protein, 9 aa, Artificial Sequence
  Synthetic peptide
RSQTECGPY

SEQ ID NO: 1829 - protein, 10 aa, Artificial Sequence
  Synthetic peptide
YVGKGTTIYY

SEQ ID NO: 1830 - protein, 9 aa, Artificial Sequence
  Synthetic peptide
SVMALAKMY

SEQ ID NO: 1831 - protein, 9 aa, Artificial Sequence
  Synthetic peptide
MALAKMYTL

SEQ ID NO: 1832 - protein, 9 aa, Artificial Sequence
  Synthetic peptide
KADAKPYSL

SEQ ID NO: 1833 - protein, 10 aa, Artificial Sequence
  Synthetic peptide
KTHYSIPSSF

SEQ ID NO: 1834 - protein, 9 aa, Artificial Sequence
  Synthetic peptide
KSNPSGPSF

SEQ ID NO: 1835 - protein, 9 aa, Artificial Sequence
  Synthetic peptide
KILGLLLAY

SEQ ID NO: 1836 - protein, 10 aa, Artificial Sequence
  Synthetic peptide
GKTMPVEFYY

SEQ ID NO: 1837 - protein, 9 aa, Artificial Sequence
  Synthetic peptide
KTMPVEFYY

SEQ ID NO: 1838 - protein, 10 aa, Artificial Sequence
  Synthetic peptide
TSLANHTVKY

SEQ ID NO: 1839 - protein, 9 aa, Artificial Sequence
  Synthetic peptide
SLANHTVKY

SEQ ID NO: 1840 - protein, 10 aa, Artificial Sequence
  Synthetic peptide
SLANHTVKYY

SEQ ID NO: 1841 - protein, 9 aa, Artificial Sequence
  Synthetic peptide
SMFKHFDNM

SEQ ID NO: 1842 - protein, 11 aa, Artificial Sequence
  Synthetic peptide
SMFKHFDNMVY

SEQ ID NO: 1843 - protein, 10 aa, Artificial Sequence
  Synthetic peptide
KHFDNMVYTF

SEQ ID NO: 1844 - protein, 9 aa, Artificial Sequence
  Synthetic peptide
HFDNMVYTF

SEQ ID NO: 1845 - protein, 9 aa, Artificial Sequence
  Synthetic peptide
SIIKAAQYY

SEQ ID NO: 1846 - protein, 9 aa, Artificial Sequence
  Synthetic peptide
GSSHLYPVF

SEQ ID NO: 1847 - protein, 9 aa, Artificial Sequence
  Synthetic peptide
ISVQLASEF

SEQ ID NO: 1848 - protein, 9 aa, Artificial Sequence
  Synthetic peptide
TMFPAEDSW

SEQ ID NO: 1849 - protein, 9 aa, Artificial Sequence
  Synthetic peptide
HLKRFGQYY

SEQ ID NO: 1850 - protein, 9 aa, Artificial Sequence
  Synthetic peptide
SLNRIVEEF

SEQ ID NO: 1851 - protein, 9 aa, Artificial Sequence
  Synthetic peptide
GIIEFNTYY

SEQ ID NO: 1852 - protein, 9 aa, Artificial Sequence
  Synthetic peptide
HTLIISPEF

SEQ ID NO: 1853 - protein, 9 aa, Artificial Sequence
  Synthetic peptide
KALQGCYTY

SEQ ID NO: 1854 - protein, 9 aa, Artificial Sequence
  Synthetic peptide
FLIDFSNLF

SEQ ID NO: 1855 - protein, 9 aa, Artificial Sequence
  Synthetic peptide
LQDEIPNYM

SEQ ID NO: 1856 - protein, 10 aa, Artificial Sequence
  Synthetic peptide
HTIGNLLKTY

SEQ ID NO: 1857 - protein, 9 aa, Artificial Sequence
  Synthetic peptide
SIQNIIQTF

SEQ ID NO: 1858 - protein, 9 aa, Artificial Sequence
  Synthetic peptide
FVEANLAAF

SEQ ID NO: 1859 - protein, 10 aa, Artificial Sequence
  Synthetic peptide
ANLAAFNQQY

SEQ ID NO: 1860 - protein, 9 aa, Artificial Sequence
  Synthetic peptide
NLAAFNQQY

SEQ ID NO: 1861 - protein, 9 aa, Artificial Sequence
  Synthetic peptide
AAFNQQYIF

SEQ ID NO: 1862 - protein, 10 aa, Artificial Sequence
  Synthetic peptide
AAFNQQYIFF

SEQ ID NO: 1863 - protein, 9 aa, Artificial Sequence
  Synthetic peptide
ASQQVNTEL

SEQ ID NO: 1864 - protein, 10 aa, Artificial Sequence
  Synthetic peptide
SMPMSMIGPY

SEQ ID NO: 1865 - protein, 10 aa, Artificial Sequence
  Synthetic peptide
SMIGPYLNVY

SEQ ID NO: 1866 - protein, 11 aa, Artificial Sequence
  Synthetic peptide
FMNFDPAHNEY

SEQ ID NO: 1867 - protein, 9 aa, Artificial Sequence
  Synthetic peptide
NVMNLFHEI

SEQ ID NO: 1868 - protein, 9 aa, Artificial Sequence
  Synthetic peptide
SVYDYISTL

SEQ ID NO: 1869 - protein, 9 aa, Artificial Sequence
  Synthetic peptide
FVQKLWAAY

SEQ ID NO: 1870 - protein, 9 aa, Artificial Sequence
  Synthetic peptide
KLWAAYEGY

SEQ ID NO: 1871 - protein, 9 aa, Artificial Sequence
  Synthetic peptide
AAYEGYFKY

SEQ ID NO: 1872 - protein, 9 aa, Artificial Sequence
  Synthetic peptide
VLEKFSQLY

SEQ ID NO: 1873 - protein, 10 aa, Artificial Sequence
  Synthetic peptide
KLYTAALGVY

SEQ ID NO: 1874 - protein, 9 aa, Artificial Sequence
  Synthetic peptide
YSDYVGSGY

SEQ ID NO: 1875 - protein, 9 aa, Artificial Sequence
  Synthetic peptide
ISPRISYQF

SEQ ID NO: 1876 - protein, 9 aa, Artificial Sequence
  Synthetic peptide
TMDPQVLNL

SEQ ID NO: 1877 - protein, 9 aa, Artificial Sequence
  Synthetic peptide
STSHLNNFL

SEQ ID NO: 1878 - protein, 9 aa, Artificial Sequence
  Synthetic peptide
SHLNNFLPI

SEQ ID NO: 1879 - protein, 10 aa, Artificial Sequence
  Synthetic peptide
KGADAVVIPY

SEQ ID NO: 1880 - protein, 9 aa, Artificial Sequence
  Synthetic peptide
FLNAYAHKL

SEQ ID NO: 1881 - protein, 10 aa, Artificial Sequence
  Synthetic peptide
MTVFPFMIPF

SEQ ID NO: 1882 - protein, 9 aa, Artificial Sequence
  Synthetic peptide
TVFPFMIPF

SEQ ID NO: 1883 - protein, 10 aa, Artificial Sequence
  Synthetic peptide
AVSDVNGMQY

SEQ ID NO: 1884 - protein, 9 aa, Artificial Sequence
  Synthetic peptide
VSDVNGMQY

SEQ ID NO: 1885 - protein, 9 aa, Artificial Sequence
  Synthetic peptide
NGMQYHFEF

SEQ ID NO: 1886 - protein, 10 aa, Artificial Sequence
  Synthetic peptide
VVQYLTPIFY

SEQ ID NO: 1887 - protein, 9 aa, Artificial Sequence
  Synthetic peptide
SGYKHLQTI

SEQ ID NO: 1888 - protein, 9 aa, Artificial Sequence
  Synthetic peptide
RISTTQHMY

SEQ ID NO: 1889 - protein, 9 aa, Artificial Sequence
  Synthetic peptide
ISTTQHMYF

SEQ ID NO: 1890 - protein, 9 aa, Artificial Sequence
  Synthetic peptide
MYFIATRPM

SEQ ID NO: 1891 - protein, 9 aa, Artificial Sequence
  Synthetic peptide
SVDLLHYHY

SEQ ID NO: 1892 - protein, 10 aa, Artificial Sequence
  Synthetic peptide
SVDLLHYHYF

SEQ ID NO: 1893 - protein, 9 aa, Artificial Sequence
  Synthetic peptide
RLDETRPQY

SEQ ID NO: 1894 - protein, 9 aa, Artificial Sequence
  Synthetic peptide
YNMFGTWEY

SEQ ID NO: 1895 - protein, 9 aa, Artificial Sequence
  Synthetic peptide
YVCPEFYYY

SEQ ID NO: 1896 - protein, 9 aa, Artificial Sequence
  Synthetic peptide
YGYYYQLPL

SEQ ID NO: 1897 - protein, 9 aa, Artificial Sequence
  Synthetic peptide
MVAVNLFRF

SEQ ID NO: 1898 - protein, 9 aa, Artificial Sequence
  Synthetic peptide
YLKEVYEKY

SEQ ID NO: 1899 - protein, 9 aa, Artificial Sequence
  Synthetic peptide
ARFARALKY

SEQ ID NO: 1900 - protein, 9 aa, Artificial Sequence
  Synthetic peptide
YTAFSDPKF

SEQ ID NO: 1901 - protein, 10 aa, Artificial Sequence
  Synthetic peptide
SLAISLSHIY

SEQ ID NO: 1902 - protein, 9 aa, Artificial Sequence
  Synthetic peptide
HSNFQQSLL

SEQ ID NO: 1903 - protein, 9 aa, Artificial Sequence
  Synthetic peptide
IVDEAHNLF

SEQ ID NO: 1904 - protein, 10 aa, Artificial Sequence
  Synthetic peptide
KTSPGPVLIY

SEQ ID NO: 1905 - protein, 9 aa, Artificial Sequence
  Synthetic peptide
KTSPGPVLI

SEQ ID NO: 1906 - protein, 9 aa, Artificial Sequence
  Synthetic peptide
RQVHILEPY

SEQ ID NO: 1907 - protein, 9 aa, Artificial Sequence
  Synthetic peptide
KTVQPFLYI

SEQ ID NO: 1908 - protein, 9 aa, Artificial Sequence
  Synthetic peptide
AVANQKMFY

SEQ ID NO: 1909 - protein, 9 aa, Artificial Sequence
  Synthetic peptide
ANQKMFYSI

SEQ ID NO: 1910 - protein, 9 aa, Artificial Sequence
  Synthetic peptide
ISYEGKQFF

SEQ ID NO: 1911 - protein, 10 aa, Artificial Sequence
  Synthetic peptide
ISYEGKQFFY

SEQ ID NO: 1912 - protein, 10 aa, Artificial Sequence
  Synthetic peptide
KQFEMFNMVY

SEQ ID NO: 1913 - protein, 10 aa, Artificial Sequence
  Synthetic peptide
KIHKKLLSPY

SEQ ID NO: 1914 - protein, 9 aa, Artificial Sequence
  Synthetic peptide
ISIIQKLLY

SEQ ID NO: 1915 - protein, 9 aa, Artificial Sequence
  Synthetic peptide
WIDELTLLL

SEQ ID NO: 1916 - protein, 9 aa, Artificial Sequence
  Synthetic peptide
RTVSPTTTF

SEQ ID NO: 1917 - protein, 9 aa, Artificial Sequence
  Synthetic peptide
ISFKHMTSI

SEQ ID NO: 1918 - protein, 9 aa, Artificial Sequence
  Synthetic peptide
CSASYQQPY

SEQ ID NO: 1919 - protein, 10 aa, Artificial Sequence
  Synthetic peptide
ADSFSINSLY

SEQ ID NO: 1920 - protein, 10 aa, Artificial Sequence
  Synthetic peptide
SFSINSLYGF

SEQ ID NO: 1921 - protein, 9 aa, Artificial Sequence
  Synthetic peptide
FSINSLYGF

SEQ ID NO: 1922 - protein, 9 aa, Artificial Sequence
  Synthetic peptide
KINTIHTLF

SEQ ID NO: 1923 - protein, 9 aa, Artificial Sequence
  Synthetic peptide
RISSELISY

SEQ ID NO: 1924 - protein, 9 aa, Artificial Sequence
  Synthetic peptide
ILNHICHQY

SEQ ID NO: 1925 - protein, 9 aa, Artificial Sequence
  Synthetic peptide
GVKHFLHEY

SEQ ID NO: 1926 - protein, 9 aa, Artificial Sequence
  Synthetic peptide
MLNAITEQL

SEQ ID NO: 1927 - protein, 10 aa, Artificial Sequence
  Synthetic peptide
TQTLMYSHLF

SEQ ID NO: 1928 - protein, 9 aa, Artificial Sequence
  Synthetic peptide
QTLMYSHLF

SEQ ID NO: 1929 - protein, 10 aa, Artificial Sequence
  Synthetic peptide
MDSEFFQPVY

SEQ ID NO: 1930 - protein, 9 aa, Artificial Sequence
  Synthetic peptide
MDSEFFQPV

SEQ ID NO: 1931 - protein, 9 aa, Artificial Sequence
  Synthetic peptide
DSEFFQPVY

SEQ ID NO: 1932 - protein, 10 aa, Artificial Sequence
  Synthetic peptide
FFQPVYPRHY

SEQ ID NO: 1933 - protein, 10 aa, Artificial Sequence
  Synthetic peptide
CLSPVTTPSF

SEQ ID NO: 1934 - protein, 10 aa, Artificial Sequence
  Synthetic peptide
LSPVTTPSFF

SEQ ID NO: 1935 - protein, 9 aa, Artificial Sequence
  Synthetic peptide
LSPVTTPSF

SEQ ID NO: 1936 - protein, 11 aa, Artificial Sequence
  Synthetic peptide
TTPSFFSTHMY

SEQ ID NO: 1937 - protein, 10 aa, Artificial Sequence
  Synthetic peptide
TPSFFSTHMY

SEQ ID NO: 1938 - protein, 10 aa, Artificial Sequence
  Synthetic peptide
SFFSTHMYTI

SEQ ID NO: 1939 - protein, 9 aa, Artificial Sequence
  Synthetic peptide
FSTHMYTIL

SEQ ID NO: 1940 - protein, 9 aa, Artificial Sequence
  Synthetic peptide
STHMYTILI

SEQ ID NO: 1941 - protein, 9 aa, Artificial Sequence
  Synthetic peptide
AIEEEDIQF

SEQ ID NO: 1942 - protein, 9 aa, Artificial Sequence
  Synthetic peptide
YQDQQWVEV

SEQ ID NO: 1943 - protein, 10 aa, Artificial Sequence
  Synthetic peptide
VTDNPVTDRL

SEQ ID NO: 1944 - protein, 11 aa, Artificial Sequence
  Synthetic peptide
ASAPAHPAEPY

SEQ ID NO: 1945 - protein, 10 aa, Artificial Sequence
  Synthetic peptide
SAPAHPAEPY

SEQ ID NO: 1946 - protein, 9 aa, Artificial Sequence
  Synthetic peptide
TASQTMSAI

SEQ ID NO: 1947 - protein, 10 aa, Artificial Sequence
  Synthetic peptide
SQTMSAIENL

SEQ ID NO: 1948 - protein, 9 aa, Artificial Sequence
  Synthetic peptide
QTMSAIENL

SEQ ID NO: 1949 - protein, 9 aa, Artificial Sequence
  Synthetic peptide
KTPEKIPEL

SEQ ID NO: 1950 - protein, 9 aa, Artificial Sequence
  Synthetic peptide
ELVDHIFNY

SEQ ID NO: 1951 - protein, 9 aa, Artificial Sequence
  Synthetic peptide
LVDHIFNYL

SEQ ID NO: 1952 - protein, 9 aa, Artificial Sequence
  Synthetic peptide
LSKNIAAEY

SEQ ID NO: 1953 - protein, 10 aa, Artificial Sequence
  Synthetic peptide
SRTASSAELY

SEQ ID NO: 1954 - protein, 9 aa, Artificial Sequence
  Synthetic peptide
RTASSAELY

SEQ ID NO: 1955 - protein, 9 aa, Artificial Sequence
  Synthetic peptide
SSAELYRKM

SEQ ID NO: 1956 - protein, 9 aa, Artificial Sequence
  Synthetic peptide
RTARHNLSL

SEQ ID NO: 1957 - protein, 9 aa, Artificial Sequence
  Synthetic peptide
HNLSLMHPL

SEQ ID NO: 1958 - protein, 9 aa, Artificial Sequence
  Synthetic peptide
MASKLAPGM

SEQ ID NO: 1959 - protein, 10 aa, Artificial Sequence
  Synthetic peptide
FTSDNGKTFF

SEQ ID NO: 1960 - protein, 9 aa, Artificial Sequence
  Synthetic peptide
ISNLNNSCF

SEQ ID NO: 1961 - protein, 9 aa, Artificial Sequence
  Synthetic peptide
SNLNNSCFI

SEQ ID NO: 1962 - protein, 9 aa, Artificial Sequence
  Synthetic peptide
RQQDSWPFY

SEQ ID NO: 1963 - protein, 9 aa, Artificial Sequence
  Synthetic peptide
HNFTNKFLM

SEQ ID NO: 1964 - protein, 9 aa, Artificial Sequence
  Synthetic peptide
FSYDNPLIF

SEQ ID NO: 1965 - protein, 9 aa, Artificial Sequence
  Synthetic peptide
KTFSDLSNY

SEQ ID NO: 1966 - protein, 9 aa, Artificial Sequence
  Synthetic peptide
STIPKSQVF

SEQ ID NO: 1967 - protein, 9 aa, Artificial Sequence
  Synthetic peptide
YNFTGWSPF

SEQ ID NO: 1968 - protein, 9 aa, Artificial Sequence
  Synthetic peptide
YSKGNTVTF

SEQ ID NO: 1969 - protein, 9 aa, Artificial Sequence
  Synthetic peptide
MNHPFLTLI

SEQ ID NO: 1970 - protein, 9 aa, Artificial Sequence
  Synthetic peptide
ATNFFIQPI

SEQ ID NO: 1971 - protein, 9 aa, Artificial Sequence
  Synthetic peptide
ISNSIFNQM

SEQ ID NO: 1972 - protein, 9 aa, Artificial Sequence
  Synthetic peptide
KVNLTTTLI

SEQ ID NO: 1973 - protein, 9 aa, Artificial Sequence
  Synthetic peptide
YTSKNFFDF

SEQ ID NO: 1974 - protein, 10 aa, Artificial Sequence
  Synthetic peptide
FIADAISAVF

SEQ ID NO: 1975 - protein, 9 aa, Artificial Sequence
  Synthetic peptide
IADAISAVF

SEQ ID NO: 1976 - protein, 9 aa, Artificial Sequence
  Synthetic peptide
RTSIGSLEY

SEQ ID NO: 1977 - protein, 9 aa, Artificial Sequence
  Synthetic peptide
NSIANYVAF

SEQ ID NO: 1978 - protein, 9 aa, Artificial Sequence
  Synthetic peptide
SVIPPSHIM

SEQ ID NO: 1979 - protein, 10 aa, Artificial Sequence
  Synthetic peptide
SGIDRHASLF

SEQ ID NO: 1980 - protein, 9 aa, Artificial Sequence
  Synthetic peptide
SSMQLQTAL

SEQ ID NO: 1981 - protein, 9 aa, Artificial Sequence
  Synthetic peptide
LSYKNAFEW

SEQ ID NO: 1982 - protein, 9 aa, Artificial Sequence
  Synthetic peptide
NAFEWIHFV

SEQ ID NO: 1983 - protein, 10 aa, Artificial Sequence
  Synthetic peptide
LTHNHILFTY

SEQ ID NO: 1984 - protein, 9 aa, Artificial Sequence
  Synthetic peptide
HMLFTTHVY

SEQ ID NO: 1985 - protein, 10 aa, Artificial Sequence
  Synthetic peptide
MLFTTHVYTY

SEQ ID NO: 1986 - protein, 9 aa, Artificial Sequence
  Synthetic peptide
KINQRSFSF

SEQ ID NO: 1987 - protein, 10 aa, Artificial Sequence
  Synthetic peptide
ATQFVQHGIY

SEQ ID NO: 1988 - protein, 9 aa, Artificial Sequence
  Synthetic peptide
KIYNKYSLF

SEQ ID NO: 1989 - protein, 10 aa, Artificial Sequence
  Synthetic peptide
RMHIYETNLY

SEQ ID NO: 1990 - protein, 9 aa, Artificial Sequence
  Synthetic peptide
HIYETNLYL

SEQ ID NO: 1991 - protein, 9 aa, Artificial Sequence
  Synthetic peptide
KQELSRLIY

SEQ ID NO: 1992 - protein, 9 aa, Artificial Sequence
  Synthetic peptide
YAANLLTNY

SEQ ID NO: 1993 - protein, 10 aa, Artificial Sequence
  Synthetic peptide
SMFQKLTKPY

SEQ ID NO: 1994 - protein, 10 aa, Artificial Sequence
  Synthetic peptide
RYVFKPTPNY

SEQ ID NO: 1995 - protein, 9 aa, Artificial Sequence
  Synthetic peptide
YVFKPTPNY

SEQ ID NO: 1996 - protein, 9 aa, Artificial Sequence
  Synthetic peptide
MRDIIQMMF

SEQ ID NO: 1997 - protein, 9 aa, Artificial Sequence
  Synthetic peptide
IQMMFFRTL

SEQ ID NO: 1998 - protein, 9 aa, Artificial Sequence
  Synthetic peptide
RTLQKHMFF

SEQ ID NO: 1999 - protein, 10 aa, Artificial Sequence
  Synthetic peptide
KVAEKTSQLY

SEQ ID NO: 2000 - protein, 9 aa, Artificial Sequence
  Synthetic peptide
ALDEPSTIF

SEQ ID NO: 2001 - protein, 9 aa, Artificial Sequence
  Synthetic peptide
ILYSNSELF

SEQ ID NO: 2002 - protein, 9 aa, Artificial Sequence
  Synthetic peptide
KTNTIYPPL

SEQ ID NO: 2003 - protein, 10 aa, Artificial Sequence
  Synthetic peptide
KTNTIYPPLW

SEQ ID NO: 2004 - protein, 9 aa, Artificial Sequence
  Synthetic peptide
RVFIFFVFL

SEQ ID NO: 2005 - protein, 10 aa, Artificial Sequence
  Synthetic peptide
RIKPQVTCKY

SEQ ID NO: 2006 - protein, 10 aa, Artificial Sequence
  Synthetic peptide
YFISENNTWY

SEQ ID NO: 2007 - protein, 9 aa, Artificial Sequence
  Synthetic peptide
FISENNTWY

SEQ ID NO: 2008 - protein, 11 aa, Artificial Sequence
  Synthetic peptide
FISENNTWYKY

SEQ ID NO: 2009 - protein, 10 aa, Artificial Sequence
  Synthetic peptide
FISENNTWYK

SEQ ID NO: 2010 - protein, 10 aa, Artificial Sequence
  Synthetic peptide
ISENNTWYKY

SEQ ID NO: 2011 - protein, 9 aa, Artificial Sequence
  Synthetic peptide
ISENNTWYK

SEQ ID NO: 2012 - protein, 9 aa, Artificial Sequence
  Synthetic peptide
SENNTWYKY

SEQ ID NO: 2013 - protein, 11 aa, Artificial Sequence
  Synthetic peptide
ILNSSIVLPAY

SEQ ID NO: 2014 - protein, 10 aa, Artificial Sequence
  Synthetic peptide
LNSSIVLPAY

SEQ ID NO: 2015 - protein, 9 aa, Artificial Sequence
  Synthetic peptide
NSSIVLPAY

SEQ ID NO: 2016 - protein, 9 aa, Artificial Sequence
  Synthetic peptide
IVLPAYNTI

SEQ ID NO: 2017 - protein, 9 aa, Artificial Sequence
  Synthetic peptide
YLQKNNISI

SEQ ID NO: 2018 - protein, 11 aa, Artificial Sequence
  Synthetic peptide
YLQKNNISIHY

SEQ ID NO: 2019 - protein, 10 aa, Artificial Sequence
  Synthetic peptide
LQKNNISIHY

SEQ ID NO: 2020 - protein, 9 aa, Artificial Sequence
  Synthetic peptide
ISIHYNTSI

SEQ ID NO: 2021 - protein, 9 aa, Artificial Sequence
  Synthetic peptide
KTFQDIRII

SEQ ID NO: 2022 - protein, 9 aa, Artificial Sequence
  Synthetic peptide
CGMKNISEI

SEQ ID NO: 2023 - protein, 9 aa, Artificial Sequence
  Synthetic peptide
NISEIAGGF

SEQ ID NO: 2024 - protein, 9 aa, Artificial Sequence
  Synthetic peptide
ELKFLDLRY

SEQ ID NO: 2025 - protein, 9 aa, Artificial Sequence
  Synthetic peptide
FLDLRYNDL

SEQ ID NO: 2026 - protein, 9 aa, Artificial Sequence
  Synthetic peptide
YNDLQVIDY

SEQ ID NO: 2027 - protein, 9 aa, Artificial Sequence
  Synthetic peptide
QVIDYNILR

SEQ ID NO: 2028 - protein, 10 aa, Artificial Sequence
  Synthetic peptide
KLIRSNTPTY

SEQ ID NO: 2029 - protein, 9 aa, Artificial Sequence
  Synthetic peptide
LIRSNTPTY

SEQ ID NO: 2030 - protein, 10 aa, Artificial Sequence
  Synthetic peptide
IRSNTPTYLY

SEQ ID NO: 2031 - protein, 9 aa, Artificial Sequence
  Synthetic peptide
IRSNTPTYL

SEQ ID NO: 2032 - protein, 11 aa, Artificial Sequence
  Synthetic peptide
IRSNTPTYLYY

SEQ ID NO: 2033 - protein, 9 aa, Artificial Sequence
  Synthetic peptide
RSNTPTYLY

SEQ ID NO: 2034 - protein, 10 aa, Artificial Sequence
  Synthetic peptide
RSNTPTYLYY

SEQ ID NO: 2035 - protein, 8 aa, Artificial Sequence
  Synthetic peptide
RSNTPTYL

SEQ ID NO: 2036 - protein, 9 aa, Artificial Sequence
  Synthetic peptide
SNTPTYLYY

SEQ ID NO: 2037 - protein, 10 aa, Artificial Sequence
  Synthetic peptide
MCGKRNCPLY

SEQ ID NO: 2038 - protein, 10 aa, Artificial Sequence
  Synthetic peptide
CGKRNCPLYY

SEQ ID NO: 2039 - protein, 9 aa, Artificial Sequence
  Synthetic peptide
CGKRNCPLY

SEQ ID NO: 2040 - protein, 11 aa, Artificial Sequence
  Synthetic peptide
GKRNCPLYYFL

SEQ ID NO: 2041 - protein, 9 aa, Artificial Sequence
  Synthetic peptide
KRNCPLYYF

SEQ ID NO: 2042 - protein, 11 aa, Artificial Sequence
  Synthetic peptide
KRNCPLYYFLL

SEQ ID NO: 2043 - protein, 10 aa, Artificial Sequence
  Synthetic peptide
KRNCPLYYFL

SEQ ID NO: 2044 - protein, 9 aa, Artificial Sequence
  Synthetic peptide
RNCPLYYFL

SEQ ID NO: 2045 - protein, 10 aa, Artificial Sequence
  Synthetic peptide
RNCPLYYFLL

SEQ ID NO: 2046 - protein, 9 aa, Artificial Sequence
  Synthetic peptide
FLLKQEQTY

SEQ ID NO: 2047 - protein, 10 aa, Artificial Sequence
  Synthetic peptide
QTYLKRLPQF

SEQ ID NO: 2048 - protein, 11 aa, Artificial Sequence
  Synthetic peptide
QTYLKRLPQFF

SEQ ID NO: 2049 - protein, 9 aa, Artificial Sequence
  Synthetic peptide
TYLKRLPQF

SEQ ID NO: 2050 - protein, 9 aa, Artificial Sequence
  Synthetic peptide
YLKRLPQFF

SEQ ID NO: 2051 - protein, 9 aa, Artificial Sequence
  Synthetic peptide
LKRLPQFFL

SEQ ID NO: 2052 - protein, 8 aa, Artificial Sequence
  Synthetic peptide
KRLPQFFL

SEQ ID NO: 2053 - protein, 11 aa, Artificial Sequence
  Synthetic peptide
KRLPQFFLRRI

SEQ ID NO: 2054 - protein, 10 aa, Artificial Sequence
  Synthetic peptide
KRLPQFFLRR

SEQ ID NO: 2055 - protein, 11 aa, Artificial Sequence
  Synthetic peptide
RRINFSNNNTF

SEQ ID NO: 2056 - protein, 10 aa, Artificial Sequence
  Synthetic peptide
RINFSNNNTF

SEQ ID NO: 2057 - protein, 11 aa, Artificial Sequence
  Synthetic peptide
INFSNNNTFLY

SEQ ID NO: 2058 - protein, 9 aa, Artificial Sequence
  Synthetic peptide
INFSNNNTF

SEQ ID NO: 2059 - protein, 10 aa, Artificial Sequence
  Synthetic peptide
NFSNNNTFLY

SEQ ID NO: 2060 - protein, 9 aa, Artificial Sequence
  Synthetic peptide
NFSNNNTFL

SEQ ID NO: 2061 - protein, 9 aa, Artificial Sequence
  Synthetic peptide
FSNNNTFLY

SEQ ID NO: 2062 - protein, 11 aa, Artificial Sequence
  Synthetic peptide
FSNNNTFLYHF

SEQ ID NO: 2063 - protein, 10 aa, Artificial Sequence
  Synthetic peptide
FSNNNTFLYH

SEQ ID NO: 2064 - protein, 10 aa, Artificial Sequence
  Synthetic peptide
SNNNTFLYHF

SEQ ID NO: 2065 - protein, 9 aa, Artificial Sequence
  Synthetic peptide
SNNNTFLYH

SEQ ID NO: 2066 - protein, 9 aa, Artificial Sequence
  Synthetic peptide
NNNTFLYHF

SEQ ID NO: 2067 - protein, 9 aa, Artificial Sequence
  Synthetic peptide
NNTFLYHFL

SEQ ID NO: 2068 - protein, 9 aa, Artificial Sequence
  Synthetic peptide
QTKYCRTKF

SEQ ID NO: 2069 - protein, 9 aa, Artificial Sequence
  Synthetic peptide
RTKFPEINI

SEQ ID NO: 2070 - protein, 9 aa, Artificial Sequence
  Synthetic peptide
NTERYKSCY

SEQ ID NO: 2071 - protein, 9 aa, Artificial Sequence
  Synthetic peptide
ERYKSCYPL

SEQ ID NO: 2072 - protein, 10 aa, Artificial Sequence
  Synthetic peptide
RYKSCYPLVF

SEQ ID NO: 2073 - protein, 9 aa, Artificial Sequence
  Synthetic peptide
RYKSCYPLV

SEQ ID NO: 2074 - protein, 9 aa, Artificial Sequence
  Synthetic peptide
YKSCYPLVF

SEQ ID NO: 2075 - protein, 9 aa, Artificial Sequence
  Synthetic peptide
KSCYPLVFI

SEQ ID NO: 2076 - protein, 8 aa, Artificial Sequence
  Synthetic peptide
KSCYPLVF

SEQ ID NO: 2077 - protein, 9 aa, Artificial Sequence
  Synthetic peptide
SILCSCISF

SEQ ID NO: 2078 - protein, 9 aa, Artificial Sequence
  Synthetic peptide
RSICKKYSC

SEQ ID NO: 2079 - protein, 10 aa, Artificial Sequence
  Synthetic peptide
TKQDKSSHNY

SEQ ID NO: 2080 - protein, 9 aa, Artificial Sequence
  Synthetic peptide
KQDKSSHNY

SEQ ID NO: 2081 - protein, 9 aa, Artificial Sequence
  Synthetic peptide
KSSHNYIPL

SEQ ID NO: 2082 - protein, 10 aa, Artificial Sequence
  Synthetic peptide
KSSHNYIPLI

SEQ ID NO: 2083 - protein, 9 aa, Artificial Sequence
  Synthetic peptide
SSHNYIPLI

SEQ ID NO: 2084 - protein, 8 aa, Artificial Sequence
  Synthetic peptide
SSHNYIPL

SEQ ID NO: 2085 - protein, 9 aa, Artificial Sequence
  Synthetic peptide
NYIPLIPSY

SEQ ID NO: 2086 - protein, 9 aa, Artificial Sequence
  Synthetic peptide
LIPSYTFSL

SEQ ID NO: 2087 - protein, 9 aa, Artificial Sequence
  Synthetic peptide
HTTSANSPI

SEQ ID NO: 2088 - protein, 10 aa, Artificial Sequence
  Synthetic peptide
TTSANSPIVY

SEQ ID NO: 2089 - protein, 9 aa, Artificial Sequence
  Synthetic peptide
TSANSPIVY

SEQ ID NO: 2090 - protein, 9 aa, Artificial Sequence
  Synthetic peptide
SANSPIVYI

SEQ ID NO: 2091 - protein, 10 aa, Artificial Sequence
  Synthetic peptide
MVSRFLIAEY

SEQ ID NO: 2092 - protein, 10 aa, Artificial Sequence
  Synthetic peptide
KAKIAFPPEY

SEQ ID NO: 2093 - protein, 9 aa, Artificial Sequence
  Synthetic peptide
IAFPPEYPY

SEQ ID NO: 2094 - protein, 9 aa, Artificial Sequence
  Synthetic peptide
YTDPPSHLI

SEQ ID NO: 2095 - protein, 9 aa, Artificial Sequence
  Synthetic peptide
SSNYLMTAI

SEQ ID NO: 2096 - protein, 9 aa, Artificial Sequence
  Synthetic peptide
TVFDRLSPI

SEQ ID NO: 2097 - protein, 11 aa, Artificial Sequence
  Synthetic peptide
TMTDHILTRPY

SEQ ID NO: 2098 - protein, 9 aa, Artificial Sequence
  Synthetic peptide
KIYRQVLTF

SEQ ID NO: 2099 - protein, 9 aa, Artificial Sequence
  Synthetic peptide
KMAVATNTY

SEQ ID NO: 2100 - protein, 9 aa, Artificial Sequence
  Synthetic peptide
MVGEYPMCY

SEQ ID NO: 2101 - protein, 9 aa, Artificial Sequence
  Synthetic peptide
YAMAVQHNL

SEQ ID NO: 2102 - protein, 9 aa, Artificial Sequence
  Synthetic peptide
MAVQHNLTI

SEQ ID NO: 2103 - protein, 9 aa, Artificial Sequence
  Synthetic peptide
FSLRCALYF

SEQ ID NO: 2104 - protein, 9 aa, Artificial Sequence
  Synthetic peptide
CALYFNDPF

SEQ ID NO: 2105 - protein, 10 aa, Artificial Sequence
  Synthetic peptide
KNVSTVFTYY

SEQ ID NO: 2106 - protein, 9 aa, Artificial Sequence
  Synthetic peptide
NVSTVFTYY

SEQ ID NO: 2107 - protein, 9 aa, Artificial Sequence
  Synthetic peptide
FSNRSVLKY

SEQ ID NO: 2108 - protein, 10 aa, Artificial Sequence
  Synthetic peptide
FSYHLTTPKY

SEQ ID NO: 2109 - protein, 9 aa, Artificial Sequence
  Synthetic peptide
SSQELFEFF

SEQ ID NO: 2110 - protein, 10 aa, Artificial Sequence
  Synthetic peptide
QELFEFFHLF

SEQ ID NO: 2111 - protein, 9 aa, Artificial Sequence
  Synthetic peptide
ELFEFFHLF

SEQ ID NO: 2112 - protein, 9 aa, Artificial Sequence
  Synthetic peptide
VTAGVLDTY

SEQ ID NO: 2113 - protein, 9 aa, Artificial Sequence
  Synthetic peptide
IISMMQTAI

SEQ ID NO: 2114 - protein, 10 aa, Artificial Sequence
  Synthetic peptide
ISMMQTAIQK

SEQ ID NO: 2115 - protein, 9 aa, Artificial Sequence
  Synthetic peptide
SMMQTAIQK

SEQ ID NO: 2116 - protein, 11 aa, Artificial Sequence
  Synthetic peptide
SMMQTAIQKNY

SEQ ID NO: 2117 - protein, 10 aa, Artificial Sequence
  Synthetic peptide
MMQTAIQKNY

SEQ ID NO: 2118 - protein, 11 aa, Artificial Sequence
  Synthetic peptide
MMQTAIQKNYF

SEQ ID NO: 2119 - protein, 9 aa, Artificial Sequence
  Synthetic peptide
MQTAIQKNY

SEQ ID NO: 2120 - protein, 10 aa, Artificial Sequence
  Synthetic peptide
MQTAIQKNYF

SEQ ID NO: 2121 - protein, 11 aa, Artificial Sequence
  Synthetic peptide
MQTAIQKNYFR

SEQ ID NO: 2122 - protein, 10 aa, Artificial Sequence
  Synthetic peptide
QTAIQKNYFR

SEQ ID NO: 2123 - protein, 9 aa, Artificial Sequence
  Synthetic peptide
QTAIQKNYF

SEQ ID NO: 2124 - protein, 11 aa, Artificial Sequence
  Synthetic peptide
QTAIQKNYFRF

SEQ ID NO: 2125 - protein, 9 aa, Artificial Sequence
  Synthetic peptide
TAIQKNYFR

SEQ ID NO: 2126 - protein, 10 aa, Artificial Sequence
  Synthetic peptide
TAIQKNYFRF

SEQ ID NO: 2127 - protein, 9 aa, Artificial Sequence
  Synthetic peptide
AIQKNYFRF

SEQ ID NO: 2128 - protein, 11 aa, Artificial Sequence
  Synthetic peptide
AIQKNYFRFFK

SEQ ID NO: 2129 - protein, 10 aa, Artificial Sequence
  Synthetic peptide
AIQKNYFRFF

SEQ ID NO: 2130 - protein, 10 aa, Artificial Sequence
  Synthetic peptide
IQKNYFRFFK

SEQ ID NO: 2131 - protein, 9 aa, Artificial Sequence
  Synthetic peptide
IQKNYFRFF

SEQ ID NO: 2132 - protein, 10 aa, Artificial Sequence
  Synthetic peptide
QKNYFRFFKK

SEQ ID NO: 2133 - protein, 9 aa, Artificial Sequence
  Synthetic peptide
QKNYFRFFK

SEQ ID NO: 2134 - protein, 9 aa, Artificial Sequence
  Synthetic peptide
KNYFRFFKK

SEQ ID NO: 2135 - protein, 8 aa, Artificial Sequence
  Synthetic peptide
KNYFRFFK

SEQ ID NO: 2136 - protein, 11 aa, Artificial Sequence
  Synthetic peptide
KNYFRFFKKLL

SEQ ID NO: 2137 - protein, 10 aa, Artificial Sequence
  Synthetic peptide
KNYFRFFKKL

SEQ ID NO: 2138 - protein, 9 aa, Artificial Sequence
  Synthetic peptide
NYFRFFKKL

SEQ ID NO: 2139 - protein, 10 aa, Artificial Sequence
  Synthetic peptide
NYFRFFKKLL

SEQ ID NO: 2140 - protein, 9 aa, Artificial Sequence
  Synthetic peptide
YFRFFKKLL

SEQ ID NO: 2141 - protein, 10 aa, Artificial Sequence
  Synthetic peptide
RFFKKLLTHF

SEQ ID NO: 2142 - protein, 9 aa, Artificial Sequence
  Synthetic peptide
RFFKKLLTH

SEQ ID NO: 2143 - protein, 9 aa, Artificial Sequence
  Synthetic peptide
KKLLTHFNI

SEQ ID NO: 2144 - protein, 10 aa, Artificial Sequence
  Synthetic peptide
KKLLTHFNIY

SEQ ID NO: 2145 - protein, 9 aa, Artificial Sequence
  Synthetic peptide
KLLTHFNIY

SEQ ID NO: 2146 - protein, 10 aa, Artificial Sequence
  Synthetic peptide
KLLTHFNIYR

SEQ ID NO: 2147 - protein, 9 aa, Artificial Sequence
  Synthetic peptide
LLTHFNIYR

SEQ ID NO: 2148 - protein, 10 aa, Artificial Sequence
  Synthetic peptide
SQMTVIDSVY

SEQ ID NO: 2149 - protein, 9 aa, Artificial Sequence
  Synthetic peptide
SVYYSIIKY

SEQ ID NO: 2150 - protein, 10 aa, Artificial Sequence
  Synthetic peptide
KAFLPKDTLY

SEQ ID NO: 2151 - protein, 10 aa, Artificial Sequence
  Synthetic peptide
KLFYNKWLKY

SEQ ID NO: 2152 - protein, 9 aa, Artificial Sequence
  Synthetic peptide
KSLKLLSFY

SEQ ID NO: 2153 - protein, 10 aa, Artificial Sequence
  Synthetic peptide
LQMAPGGSYF

SEQ ID NO: 2154 - protein, 9 aa, Artificial Sequence
  Synthetic peptide
QMAPGGSYF

SEQ ID NO: 2155 - protein, 9 aa, Artificial Sequence
  Synthetic peptide
ITDNMTEEF

SEQ ID NO: 2156 - protein, 9 aa, Artificial Sequence
  Synthetic peptide
YYYDNLHIF

SEQ ID NO: 2157 - protein, 10 aa, Artificial Sequence
  Synthetic peptide
MLYNEPLGTY

SEQ ID NO: 2158 - protein, 9 aa, Artificial Sequence
  Synthetic peptide
GTYAVSSLF

SEQ ID NO: 2159 - protein, 10 aa, Artificial Sequence
  Synthetic peptide
RIHTRFGQYY

SEQ ID NO: 2160 - protein, 9 aa, Artificial Sequence
  Synthetic peptide
RIHTRFGQY

SEQ ID NO: 2161 - protein, 9 aa, Artificial Sequence
  Synthetic peptide
EYYEKIDDF

SEQ ID NO: 2162 - protein, 10 aa, Artificial Sequence
  Synthetic peptide
EYYEKIDDFI

SEQ ID NO: 2163 - protein, 9 aa, Artificial Sequence
  Synthetic peptide
YYEKIDDFI

SEQ ID NO: 2164 - protein, 11 aa, Artificial Sequence
  Synthetic peptide
YEKIDDFIRLY

SEQ ID NO: 2165 - protein, 10 aa, Artificial Sequence
  Synthetic peptide
EKIDDFIRLY

SEQ ID NO: 2166 - protein, 9 aa, Artificial Sequence
  Synthetic peptide
KIDDFIRLY

SEQ ID NO: 2167 - protein, 10 aa, Artificial Sequence
  Synthetic peptide
KIDDFIRLYP

SEQ ID NO: 2168 - protein, 8 aa, Artificial Sequence
  Synthetic peptide
KIDDFIRL

SEQ ID NO: 2169 - protein, 11 aa, Artificial Sequence
  Synthetic peptide
FIRLYPHIFYR

SEQ ID NO: 2170 - protein, 9 aa, Artificial Sequence
  Synthetic peptide
FIRLYPHIF

SEQ ID NO: 2171 - protein, 10 aa, Artificial Sequence
  Synthetic peptide
FIRLYPHIFY

SEQ ID NO: 2172 - protein, 10 aa, Artificial Sequence
  Synthetic peptide
IRLYPHIFYR

SEQ ID NO: 2173 - protein, 9 aa, Artificial Sequence
  Synthetic peptide
IRLYPHIFY

SEQ ID NO: 2174 - protein, 11 aa, Artificial Sequence
  Synthetic peptide
RLYPHIFYRPL

SEQ ID NO: 2175 - protein, 9 aa, Artificial Sequence
  Synthetic peptide
RLYPHIFYR

SEQ ID NO: 2176 - protein, 8 aa, Artificial Sequence
  Synthetic peptide
RLYPHIFY

SEQ ID NO: 2177 - protein, 10 aa, Artificial Sequence
  Synthetic peptide
RLYPHIFYRP

SEQ ID NO: 2178 - protein, 11 aa, Artificial Sequence
  Synthetic peptide
LYPHIFYRPLY

SEQ ID NO: 2179 - protein, 10 aa, Artificial Sequence
  Synthetic peptide
LYPHIFYRPL

SEQ ID NO: 2180 - protein, 11 aa, Artificial Sequence
  Synthetic peptide
YPHIFYRPLYR

SEQ ID NO: 2181 - protein, 10 aa, Artificial Sequence
  Synthetic peptide
YPHIFYRPLY

SEQ ID NO: 2182 - protein, 9 aa, Artificial Sequence
  Synthetic peptide
YPHIFYRPL

SEQ ID NO: 2183 - protein, 10 aa, Artificial Sequence
  Synthetic peptide
PHIFYRPLYR

SEQ ID NO: 2184 - protein, 9 aa, Artificial Sequence
  Synthetic peptide
PHIFYRPLY

SEQ ID NO: 2185 - protein, 10 aa, Artificial Sequence
  Synthetic peptide
HIFYRPLYRY

SEQ ID NO: 2186 - protein, 9 aa, Artificial Sequence
  Synthetic peptide
HIFYRPLYR

SEQ ID NO: 2187 - protein, 11 aa, Artificial Sequence
  Synthetic peptide
HIFYRPLYRYK

SEQ ID NO: 2188 - protein, 8 aa, Artificial Sequence
  Synthetic peptide
HIFYRPLY

SEQ ID NO: 2189 - protein, 9 aa, Artificial Sequence
  Synthetic peptide
IFYRPLYRY

SEQ ID NO: 2190 - protein, 10 aa, Artificial Sequence
  Synthetic peptide
IFYRPLYRYK

SEQ ID NO: 2191 - protein, 9 aa, Artificial Sequence
  Synthetic peptide
FYRPLYRYK

SEQ ID NO: 2192 - protein, 10 aa, Artificial Sequence
  Synthetic peptide
FINYNHGNFF

SEQ ID NO: 2193 - protein, 9 aa, Artificial Sequence
  Synthetic peptide
ALNRHITTY

SEQ ID NO: 2194 - protein, 10 aa, Artificial Sequence
  Synthetic peptide
RSCDYAPGFY

SEQ ID NO: 2195 - protein, 9 aa, Artificial Sequence
  Synthetic peptide
TTADLQSPF

SEQ ID NO: 2196 - protein, 9 aa, Artificial Sequence
  Synthetic peptide
VMAPIPLVL

SEQ ID NO: 2197 - protein, 10 aa, Artificial Sequence
  Synthetic peptide
KVRNKAIELY

SEQ ID NO: 2198 - protein, 9 aa, Artificial Sequence
  Synthetic peptide
KAIELYWVF

SEQ ID NO: 2199 - protein, 9 aa, Artificial Sequence
  Synthetic peptide
VLSPHDFLL

SEQ ID NO: 2200 - protein, 10 aa, Artificial Sequence
  Synthetic peptide
RTNDAKHVHF

SEQ ID NO: 2201 - protein, 9 aa, Artificial Sequence
  Synthetic peptide
QVAVDRFRF

SEQ ID NO: 2202 - protein, 9 aa, Artificial Sequence
  Synthetic peptide
RRIASVEEL

SEQ ID NO: 2203 - protein, 10 aa, Artificial Sequence
  Synthetic peptide
RRIASVEELL

SEQ ID NO: 2204 - protein, 9 aa, Artificial Sequence
  Synthetic peptide
RIASVEELL

SEQ ID NO: 2205 - protein, 9 aa, Artificial Sequence
  Synthetic peptide
SVEELLSAV

SEQ ID NO: 2206 - protein, 10 aa, Artificial Sequence
  Synthetic peptide
MTSSEWIAEY

SEQ ID NO: 2207 - protein, 9 aa, Artificial Sequence
  Synthetic peptide
TSSEWIAEY

SEQ ID NO: 2208 - protein, 9 aa, Artificial Sequence
  Synthetic peptide
SADKKFSVF

SEQ ID NO: 2209 - protein, 9 aa, Artificial Sequence
  Synthetic peptide
SVFGKGSLM

SEQ ID NO: 2210 - protein, 9 aa, Artificial Sequence
  Synthetic peptide
RVFCTIKYF

SEQ ID NO: 2211 - protein, 9 aa, Artificial Sequence
  Synthetic peptide
ASFKEGLSL

SEQ ID NO: 2212 - protein, 9 aa, Artificial Sequence
  Synthetic peptide
SLVTVNTEY

SEQ ID NO: 2213 - protein, 9 aa, Artificial Sequence
  Synthetic peptide
KTSSNIILY

SEQ ID NO: 2214 - protein, 9 aa, Artificial Sequence
  Synthetic peptide
ELFSNNLLF

SEQ ID NO: 2215 - protein, 11 aa, Artificial Sequence
  Synthetic peptide
FILDDISFSEM

SEQ ID NO: 2216 - protein, 10 aa, Artificial Sequence
  Synthetic peptide
ILDDISFSEM

SEQ ID NO: 2217 - protein, 11 aa, Artificial Sequence
  Synthetic peptide
ILDDISFSEML

SEQ ID NO: 2218 - protein, 9 aa, Artificial Sequence
  Synthetic peptide
LDDISFSEM

SEQ ID NO: 2219 - protein, 9 aa, Artificial Sequence
  Synthetic peptide
DDISFSEML

SEQ ID NO: 2220 - protein, 10 aa, Artificial Sequence
  Synthetic peptide
ISFSEMLTRY

SEQ ID NO: 2221 - protein, 9 aa, Artificial Sequence
  Synthetic peptide
ISFSEMLTR

SEQ ID NO: 2222 - protein, 11 aa, Artificial Sequence
  Synthetic peptide
ISFSEMLTRYW

SEQ ID NO: 2223 - protein, 9 aa, Artificial Sequence
  Synthetic peptide
SFSEMLTRY

SEQ ID NO: 2224 - protein, 11 aa, Artificial Sequence
  Synthetic peptide
SFSEMLTRYWY

SEQ ID NO: 2225 - protein, 10 aa, Artificial Sequence
  Synthetic peptide
SFSEMLTRYW

SEQ ID NO: 2226 - protein, 10 aa, Artificial Sequence
  Synthetic peptide
FSEMLTRYWY

SEQ ID NO: 2227 - protein, 9 aa, Artificial Sequence
  Synthetic peptide
FSEMLTRYW

SEQ ID NO: 2228 - protein, 9 aa, Artificial Sequence
  Synthetic peptide
SEMLTRYWY

SEQ ID NO: 2229 - protein, 11 aa, Artificial Sequence
  Synthetic peptide
SEMLTRYWYSM

SEQ ID NO: 2230 - protein, 10 aa, Artificial Sequence
  Synthetic peptide
SEMLTRYWYS

SEQ ID NO: 2231 - protein, 8 aa, Artificial Sequence
  Synthetic peptide
SEMLTRYW

SEQ ID NO: 2232 - protein, 11 aa, Artificial Sequence
  Synthetic peptide
YWYSMAILYNL

SEQ ID NO: 2233 - protein, 10 aa, Artificial Sequence
  Synthetic peptide
WYSMAILYNL

SEQ ID NO: 2234 - protein, 9 aa, Artificial Sequence
  Synthetic peptide
YSMAILYNL

SEQ ID NO: 2235 - protein, 8 aa, Artificial Sequence
  Synthetic peptide
SMAILYNL

SEQ ID NO: 2236 - protein, 11 aa, Artificial Sequence
  Synthetic peptide
MAILYNLTEAI

SEQ ID NO: 2237 - protein, 10 aa, Artificial Sequence
  Synthetic peptide
AILYNLTEAI

SEQ ID NO: 2238 - protein, 9 aa, Artificial Sequence
  Synthetic peptide
ILYNLTEAI

SEQ ID NO: 2239 - protein, 11 aa, Artificial Sequence
  Synthetic peptide
ILYNLTEAIQY

SEQ ID NO: 2240 - protein, 11 aa, Artificial Sequence
  Synthetic peptide
YNLTEAIQYFY

SEQ ID NO: 2241 - protein, 10 aa, Artificial Sequence
  Synthetic peptide
YNLTEAIQYF

SEQ ID NO: 2242 - protein, 9 aa, Artificial Sequence
  Synthetic peptide
YNLTEAIQY

SEQ ID NO: 2243 - protein, 9 aa, Artificial Sequence
  Synthetic peptide
NLTEAIQYF

SEQ ID NO: 2244 - protein, 10 aa, Artificial Sequence
  Synthetic peptide
NLTEAIQYFY

SEQ ID NO: 2245 - protein, 9 aa, Artificial Sequence
  Synthetic peptide
LTEAIQYFY

SEQ ID NO: 2246 - protein, 11 aa, Artificial Sequence
  Synthetic peptide
TEAIQYFYQRY

SEQ ID NO: 2247 - protein, 8 aa, Artificial Sequence
  Synthetic peptide
TEAIQYFY

SEQ ID NO: 2248 - protein, 10 aa, Artificial Sequence
  Synthetic peptide
TEAIQYFYQR

SEQ ID NO: 2249 - protein, 9 aa, Artificial Sequence
  Synthetic peptide
EAIQYFYQR

SEQ ID NO: 2250 - protein, 10 aa, Artificial Sequence
  Synthetic peptide
EAIQYFYQRY

SEQ ID NO: 2251 - protein, 9 aa, Artificial Sequence
  Synthetic peptide
AIQYFYQRY

SEQ ID NO: 2252 - protein, 10 aa, Artificial Sequence
  Synthetic peptide
AIQYFYQRYR

SEQ ID NO: 2253 - protein, 9 aa, Artificial Sequence
  Synthetic peptide
IQYFYQRYR

SEQ ID NO: 2254 - protein, 8 aa, Artificial Sequence
  Synthetic peptide
IQYFYQRY

SEQ ID NO: 2255 - protein, 11 aa, Artificial Sequence
  Synthetic peptide
QYFYQRYRHFK

SEQ ID NO: 2256 - protein, 10 aa, Artificial Sequence
  Synthetic peptide
QYFYQRYRHF

SEQ ID NO: 2257 - protein, 10 aa, Artificial Sequence
  Synthetic peptide
YFYQRYRHFK

SEQ ID NO: 2258 - protein, 9 aa, Artificial Sequence
  Synthetic peptide
YFYQRYRHF

SEQ ID NO: 2259 - protein, 9 aa, Artificial Sequence
  Synthetic peptide
FYQRYRHFK

SEQ ID NO: 2260 - protein, 10 aa, Artificial Sequence
  Synthetic peptide
YQRYRHFKDW

SEQ ID NO: 2261 - protein, 11 aa, Artificial Sequence
  Synthetic peptide
QRYRHFKDWRL

SEQ ID NO: 2262 - protein, 9 aa, Artificial Sequence
  Synthetic peptide
QRYRHFKDW

SEQ ID NO: 2263 - protein, 9 aa, Artificial Sequence
  Synthetic peptide
RYRHFKDWR

SEQ ID NO: 2264 - protein, 10 aa, Artificial Sequence
  Synthetic peptide
RYRHFKDWRL

SEQ ID NO: 2265 - protein, 11 aa, Artificial Sequence
  Synthetic peptide
RYRHFKDWRLI

SEQ ID NO: 2266 - protein, 9 aa, Artificial Sequence
  Synthetic peptide
YRHFKDWRL

SEQ ID NO: 2267 - protein, 10 aa, Artificial Sequence
  Synthetic peptide
YRHFKDWRLI

SEQ ID NO: 2268 - protein, 9 aa, Artificial Sequence
  Synthetic peptide
RHFKDWRLI

SEQ ID NO: 2269 - protein, 8 aa, Artificial Sequence
  Synthetic peptide
RHFKDWRL

SEQ ID NO: 2270 - protein, 10 aa, Artificial Sequence
  Synthetic peptide
RHFKDWRLIC

SEQ ID NO: 2271 - protein, 9 aa, Artificial Sequence
  Synthetic peptide
MMKLTCSTY

SEQ ID NO: 2272 - protein, 11 aa, Artificial Sequence
  Synthetic peptide
STYDGNYSTIY

SEQ ID NO: 2273 - protein, 9 aa, Artificial Sequence
  Synthetic peptide
SSNTSLLSI

SEQ ID NO: 2274 - DNA, 27 bp, Artificial Sequence
  Synthetic nucleic acid
tayatggaraaytgyaarttytgytgg

SEQ ID NO: 2275 - DNA, 33 bp, Artificial Sequence
  Synthetic nucleic acid
  misc_feature (6)..(6): n is a, c, g, or t
  misc_feature (12)..(12): n is a, c, g, or t
  misc_feature (15)..(15): n is a, c, g, or t
  misc_feature (21)..(21): n is a, c, g, or t
  misc_feature (30)..(30): n is a, c, g, or t
aarwsnatgccnytnathgtngaraaywsntay

SEQ ID NO: 2276 - DNA, 27 bp, Artificial Sequence
  Synthetic nucleic acid
  misc_feature (6)..(6): n is a, c, g, or t
  misc_feature (12)..(12): n is a, c, g, or t
  misc_feature (18)..(18): n is a, c, g, or t
tgyacntaygcnaarwsntgygaytty

SEQ ID NO: 2277 - DNA, 27 bp, Artificial Sequence
  Synthetic nucleic acid
  misc_feature (3)..(3): n is a, c, g, or t
  misc_feature (6)..(6): n is a, c, g, or t
  misc_feature (9)..(9): n is a, c, g, or t
  misc_feature (12)..(12): n is a, c, g, or t
  misc_feature (15)..(15): n is a, c, g, or t
  misc_feature (18)..(18): n is a, c, g, or t
  misc_feature (21)..(21): n is a, c, g, or t
wsnytnwsnacnytnytnytnaartay

SEQ ID NO: 2278 - DNA, 27 bp, Artificial Sequence
  Synthetic nucleic acid
  misc_feature (3)..(3): n is a, c, g, or t
  misc_feature (6)..(6): n is a, c, g, or t
  misc_feature (18)..(18): n is a, c, g, or t
wsnacntayttycargtnaargartty

SEQ ID NO: 2279 - DNA, 30 bp, Artificial Sequence
  Synthetic nucleic acid
  misc_feature (15)..(15): n is a, c, g, or t
  misc_feature (21)..(21): n is a, c, g, or t
  misc_feature (24)..(24): n is a, c, g, or t
garathatgcargcntaygcnytngartay

SEQ ID NO: 2280 - DNA, 27 bp, Artificial Sequence
  Synthetic nucleic acid
  misc_feature (3)..(3): n is a, c, g, or t
  misc_feature (15)..(15): n is a, c, g, or t
mgncartaygayytnathcaraartay

SEQ ID NO: 2281 - DNA, 27 bp, Artificial Sequence
  Synthetic nucleic acid
  misc_feature (12)..(12): n is a, c, g, or t
  misc_feature (15)..(15): n is a, c, g, or t
  misc_feature (21)..(21): n is a, c, g, or t
  misc_feature (27)..(27): n is a, c, g, or t
cayaayathacnggntayacntayytn

SEQ ID NO: 2282 - DNA, 27 bp, Artificial Sequence
  Synthetic nucleic acid
  misc_feature (3)..(3): n is a, c, g, or t
  misc_feature (6)..(6): n is a, c, g, or t
  misc_feature (9)..(9): n is a, c, g, or t
  misc_feature (12)..(12): n is a, c, g, or t
  misc_feature (15)..(15): n is a, c, g, or t
  misc_feature (18)..(18): n is a, c, g, or t
  misc_feature (21)..(21): n is a, c, g, or t
gcngcngcnggnggnytnytnaaytty

SEQ ID NO: 2283 - DNA, 30 bp, Artificial Sequence
  Synthetic nucleic acid
  misc_feature (3)..(3): n is a, c, g, or t
  misc_feature (9)..(9): n is a, c, g, or t
  misc_feature (15)..(15): n is a, c, g, or t
  misc_feature (24)..(24): n is a, c, g, or t
  misc_feature (27)..(27): n is a, c, g, or t
wsncayytngarggnttyatgmgnacntay

SEQ ID NO: 2284 - DNA, 27 bp, Artificial Sequence
  Synthetic nucleic acid
  misc_feature (6)..(6): n is a, c, g, or t
  misc_feature (15)..(15): n is a, c, g, or t
  misc_feature (18)..(18): n is a, c, g, or t
  misc_feature (24)..(24): n is a, c, g, or t
  misc_feature (27)..(27): n is a, c, g, or t
garggnttyatgmgnacntayytnytn

SEQ ID NO: 2285 - DNA, 27 bp, Artificial Sequence
  Synthetic nucleic acid
  misc_feature (3)..(3): n is a, c, g, or t
  misc_feature (15)..(15): n is a, c, g, or t
  misc_feature (18)..(18): n is a, c, g, or t
  misc_feature (21)..(21): n is a, c, g, or t
  misc_feature (24)..(24): n is a, c, g, or t
mgntayathtggwsnggnytngtntay

SEQ ID NO: 2286 - DNA, 30 bp, Artificial Sequence
  Synthetic nucleic acid
  misc_feature (6)..(6): n is a, c, g, or t
  misc_feature (9)..(9): n is a, c, g, or t
  misc_feature (15)..(15): n is a, c, g, or t
  misc_feature (21)..(21): n is a, c, g, or t
  misc_feature (27)..(27): n is a, c, g, or t
aarmgnytnttywsnathwsnaargtnatg

SEQ ID NO: 2287 - DNA, 27 bp, Artificial Sequence
  Synthetic nucleic acid
  misc_feature (21)..(21): n is a, c, g, or t
  misc_feature (24)..(24): n is a, c, g, or t
aaraayathathaargarytngtntty

SEQ ID NO: 2288 - DNA, 27 bp, Artificial Sequence
  Synthetic nucleic acid
  misc_feature (3)..(3): n is a, c, g, or t
  misc_feature (6)..(6): n is a, c, g, or t
  misc_feature (9)..(9): n is a, c, g, or t
  misc_feature (12)..(12): n is a, c, g, or t
  misc_feature (21)..(21): n is a, c, g, or t
  misc_feature (24)..(24): n is a, c, g, or t
  misc_feature (27)..(27): n is a, c, g, or t
ggnmgnwsnytnaayatgytnwsnytn

SEQ ID NO: 2289 - DNA, 30 bp, Artificial Sequence
  Synthetic nucleic acid
  misc_feature (6)..(6): n is a, c, g, or t
  misc_feature (9)..(9): n is a, c, g, or t
  misc_feature (15)..(15): n is a, c, g, or t
  misc_feature (18)..(18): n is a, c, g, or t
  misc_feature (30)..(30): n is a, c, g, or t
tgggcngtnttyacnggnaayatggarytn

SEQ ID NO: 2290 - DNA, 27 bp, Artificial Sequence
  Synthetic nucleic acid
  misc_feature (3)..(3): n is a, c, g, or t
  misc_feature (6)..(6): n is a, c, g, or t
  misc_feature (12)..(12): n is a, c, g, or t
  misc_feature (15)..(15): n is a, c, g, or t
  misc_feature (27)..(27): n is a, c, g, or t
gcngtnttyacnggnaayatggarytn

SEQ ID NO: 2291 - DNA, 30 bp, Artificial Sequence
  Synthetic nucleic acid
  misc_feature (3)..(3): n is a, c, g, or t
  misc_feature (6)..(6): n is a, c, g, or t
  misc_feature (12)..(12): n is a, c, g, or t
  misc_feature (24)..(24): n is a, c, g, or t
  misc_feature (27)..(27): n is a, c, g, or t
  misc_feature (30)..(30): n is a, c, g, or t
mgnacngayytnaayaaytgygtnwsnytn

SEQ ID NO: 2292 - RNA, 27 nt, Artificial Sequence
  Synthetic nucleic acid
uayauggaraayugyaaruuyugyugg

SEQ ID NO: 2293 - RNA, 33 nt, Artificial Sequence
  Synthetic nucleic acid
  misc_feature (6)..(6): n is a, c, g, or u
  misc_feature (12)..(12): n is a, c, g, or u
  misc_feature (15)..(15): n is a, c, g, or u
  misc_feature (21)..(21): n is a, c, g, or u
  misc_feature (30)..(30): n is a, c, g, or u
aarwsnaugccnyunauhgungaraaywsnuay

SEQ ID NO: 2294 - RNA, 27 nt, Artificial Sequence
  Synthetic nucleic acid
  misc_feature (6)..(6): n is a, c, g, or u
  misc_feature (12)..(12): n is a, c, g, or u
  misc_feature (18)..(18): n is a, c, g, or u
ugyacnuaygcnaarwsnugygayuuy

SEQ ID NO: 2295 - RNA, 27 nt, Artificial Sequence
  Synthetic nucleic acid
  misc_feature (3)..(3): n is a, c, g, or u
  misc_feature (6)..(6): n is a, c, g, or u
  misc_feature (9)..(9): n is a, c, g, or u
  misc_feature (12)..(12): n is a, c, g, or u
  misc_feature (15)..(15): n is a, c, g, or u
  misc_feature (18)..(18): n is a, c, g, or u
  misc_feature (21)..(21): n is a, c, g, or u
wsnyunwsnacnyunyunyunaaruay

SEQ ID NO: 2296 - RNA, 27 nt, Artificial Sequence
  Synthetic nucleic acid
  misc_feature (3)..(3): n is a, c, g, or u
  misc_feature (6)..(6): n is a, c, g, or u
  misc_feature (18)..(18): n is a, c, g, or u
wsnacnuayuuycargunaargaruuy

SEQ ID NO: 2297 - RNA, 30 nt, Artificial Sequence
  Synthetic nucleic acid
  misc_feature (15)..(15): n is a, c, g, or u
  misc_feature (21)..(21): n is a, c, g, or u
  misc_feature (24)..(24): n is a, c, g, or u
garauhaugcargcnuaygcnyungaruay

SEQ ID NO: 2298 - RNA, 27 nt, Artificial Sequence
  Synthetic nucleic acid
  misc_feature (3)..(3): n is a, c, g, or u
  misc_feature (15)..(15): n is a, c, g, or u
mgncaruaygayyunauhcaraaruay

SEQ ID NO: 2299 - RNA, 27 nt, Artificial Sequence
  Synthetic nucleic acid
  misc_feature (12)..(12): n is a, c, g, or u
  misc_feature (15)..(15): n is a, c, g, or u
  misc_feature (21)..(21): n is a, c, g, or u
  misc_feature (27)..(27): n is a, c, g, or u
cayaayauhacnggnuayacnuayyun

SEQ ID NO: 2300 - RNA, 27 nt, Artificial Sequence
  Synthetic nucleic acid
  misc_feature (3)..(3): n is a, c, g, or u
  misc_feature (6)..(6): n is a, c, g, or u
  misc_feature (9)..(9): n is a, c, g, or u
  misc_feature (12)..(12): n is a, c, g, or u
  misc_feature (15)..(15): n is a, c, g, or u
  misc_feature (18)..(18): n is a, c, g, or u
  misc_feature (21)..(21): n is a, c, g, or u
gcngcngcnggnggnyunyunaayuuy

SEQ ID NO: 2301 - RNA, 30 nt, Artificial Sequence
  Synthetic nucleic acid
  misc_feature (3)..(3): n is a, c, g, or u
  misc_feature (9)..(9): n is a, c, g, or u
  misc_feature (15)..(15): n is a, c, g, or u
  misc_feature (24)..(24): n is a, c, g, or u
  misc_feature (27)..(27): n is a, c, g, or u
wsncayyungarggnuuyaugmgnacnuay

SEQ ID NO: 2302 - RNA, 27 nt, Artificial Sequence
  Synthetic nucleic acid
  misc_feature (6)..(6): n is a, c, g, or u
  misc_feature (15)..(15): n is a, c, g, or u
  misc_feature (18)..(18): n is a, c, g, or u
  misc_feature (24)..(24): n is a, c, g, or u
  misc_feature (27)..(27): n is a, c, g, or u
garggnuuyaugmgnacnuayyunyun

SEQ ID NO: 2303 - RNA, 27 nt, Artificial Sequence
  Synthetic nucleic acid
  misc_feature (3)..(3): n is a, c, g, or u
  misc_feature (15)..(15): n is a, c, g, or u
  misc_feature (18)..(18): n is a, c, g, or u
  misc_feature (21)..(21): n is a, c, g, or u
  misc_feature (24)..(24): n is a, c, g, or u
mgnuayauhuggwsnggnyungunuay

SEQ ID NO: 2304 - RNA, 30 nt, Artificial Sequence
  Synthetic nucleic acid
  misc_feature (6)..(6): n is a, c, g, or u
  misc_feature (9)..(9): n is a, c, g, or u
  misc_feature (15)..(15): n is a, c, g, or u
  misc_feature (21)..(21): n is a, c, g, or u
  misc_feature (27)..(27): n is a, c, g, or u
aarmgnyunuuywsnauhwsnaargunaug

SEQ ID NO: 2305 - RNA, 27 nt, Artificial Sequence
  Synthetic nucleic acid
  misc_feature (21)..(21): n is a, c, g, or u
  misc_feature (24)..(24): n is a, c, g, or u
aaraayauhauhaargaryungunuuy

SEQ ID NO: 2306 - RNA, 27 nt, Artificial Sequence
  Synthetic nucleic acid
  misc_feature (3)..(3): n is a, c, g, or u
  misc_feature (6)..(6): n is a, c, g, or u
  misc_feature (9)..(9): n is a, c, g, or u
  misc_feature (12)..(12): n is a, c, g, or u
  misc_feature (21)..(21): n is a, c, g, or u
  misc_feature (24)..(24): n is a, c, g, or u
  misc_feature (27)..(27): n is a, c, g, or u
ggnmgnwsnyunaayaugyunwsnyun

SEQ ID NO: 2307 - RNA, 30 nt, Artificial Sequence
  Synthetic nucleic acid
  misc_feature (6)..(6): n is a, c, g, or u
  misc_feature (9)..(9): n is a, c, g, or u
  misc_feature (15)..(15): n is a, c, g, or u
  misc_feature (18)..(18): n is a, c, g, or u
  misc_feature (30)..(30): n is a, c, g, or u
ugggcngunuuyacnggnaayauggaryun

SEQ ID NO: 2308 - RNA, 27 nt, Artificial Sequence
  Synthetic nucleic acid
  misc_feature (3)..(3): n is a, c, g, or u
  misc_feature (6)..(6): n is a, c, g, or u
  misc_feature (12)..(12): n is a, c, g, or u
  misc_feature (15)..(15): n is a, c, g, or u
  misc_feature (27)..(27): n is a, c, g, or u
gcngunuuyacnggnaayauggaryun

SEQ ID NO: 2309 - RNA, 30 nt, Artificial Sequence
  Synthetic nucleic acid
  misc_feature (3)..(3): n is a, c, g, or u
  misc_feature (6)..(6): n is a, c, g, or u
  misc_feature (12)..(12): n is a, c, g, or u
  misc_feature (24)..(24): n is a, c, g, or u
  misc_feature (27)..(27): n is a, c, g, or u
  misc_feature (30)..(30): n is a, c, g, or u
mgnacngayyunaayaayugygunwsnyun

SEQ ID NO: 2310 - protein, 333 aa, Artificial Sequence
  Synthetic peptide
MVLIEFLTGFFYLYGKRLFSISKVMDMICLDYYTIIPAPLAMMLAARLKNYDLMKRLHEWEISIDYALLVVDDVPSIDYCLSLGARSPTRAQKRELLRDNTFNPVYKYLMNCSGFPTKREKNIPCDVQCERLQKNIIKELVFNCSVLLEMKKNLLDATLTRYVKDSTYFQVKEFMQDFSISPEKFIKIAVREKRNVLIKGISEDIWENPAERIRNLKQIVCTIKYESGRQFLINIIHTIYQSYSLKPEEILKLATFYVKHNATTHFKDLCKYLWLNRRTESKKLFLECLEIADKKEFPDIKSIVSEYINYLFTAGAITKEEIMQAYALEYAMY

SEQ ID NO: 2311 - protein, 234 aa, Artificial Sequence
  Synthetic peptide
MLVIFLEILGLLANQVLGLPTQAGGHLRSTDNPPQEELGYWCTYMENCKFCWECAHGICKNKVNKSMPLIVENSYLTSCEVSRWYNQCTYGEGNGHYHVMDCSDPVPHNRPHQLLMKIYEKDDLAAYNGMTPVMKAAIRGRSLNMLSLIKFGADPTQKDYHRGFTAWDWAVFTGNMELVKSLNHDYQNLSTCISLFTSWMFSTGGLRKSPKLLLLAVNIMSMKNFLNRIQSSCV

SEQ ID NO: 2312 - protein, 477 aa, Artificial Sequence
  Synthetic peptide
MVLIEFLTGFFYLYGKRLFSISKVMDMICLDYYTIIPAPLAMMLAARLKNYDLMKRLHEWEISIDYALLVVDDVPSIDYCLSLGARSPTRAQKRELLRDNTFNPVYKYLMNCSGFPTKREKNIPCDVQCERLQKNIIKELVFNCSVLLEMGPGPGYMENCKFCWECAHGICKNKVNKSMPLIVENSYNGMTPVMKAAIRGRSLNMLSLIKFGADPTQKDYHRGFTAWDWAVFTGNMELVKSLNHDYQNLSTCISLFTSWMFSTGGLRKSPKLLLLAVNIMSMKNFLNRIQSSCVKKNLLDATLTRYVKDSTYFQVKEFMQDFSISPEKFIKIAVREKRNVLIKGISEDIWENPAERIRNLKQIVCTIKYESGRQFLINIIHTIYQSYSLKPEEILKLATFYVKHNATTHFKDLCKYLWLNRRTESKKLFLECLEIADKKEFPDIKSIVSEYINYLFTAGAITKEEIMQAYALEYAMY

SEQ ID NO: 2313 - protein, 481 aa, Artificial Sequence
  Synthetic peptide
MVLIEFLTGFFYLYGKRLFSISKVMDMICLDYYTIIPAPLAMMLAARLKNYDLMKRLHEWEISIDYALLVVDDVPSIDYCLSLGARSPTRAQKRELLRDNTFNPVYKYLMNCSGFPTKREKNIPCDVQCERLQKNIIKELVFNCSVLLEMCTYMENCKFCWECAHGICKNKVNKSMPLIVENSYLTSKKNLLDATLTRYVKDSTYFQVKEFMQDFSISPEKFIKIAVREKRNVLIKGISEDIWENPAERIRNLKQIVCTIKYESGRQFLINIIHTIYQSYSLKPEEILKLATFYVKHNATTHFKDLCKYLWLNRRTESKKLFLECLEIADKKEFPDIKSIVSEYINYLFTAGAITKEEIMQAYALEYAMYLPNFNGMTPVMKAAIRGRSLNMLSLIKFGADPTQKDYHRGFTAWDWAVFTGNMELVKSLNHDYQNLSTCISLFTSWMFSTGGLRKSPKLLLLAVNIMSMKNFLNRIQSSCV

SEQ ID NO: 2314 - protein, 564 aa, Artificial Sequence
  Synthetic peptide
MVLIEFLTGFFYLYGKRLFSISKVMDMICLDYYTIIPAPLAMMLAARLKNYDLMKRLHEWEISIDYALLVVDDVPSIDYCLSLGARSPTRAQKRELLRDNTFNPVYKYLMNCSGFPTKREKNIPCDVQCERLQKNIIKELVFNCSVLLEMCTYAKSCDFHNITGYTYLRQYDLIQKYAAAGGLLNFCTYMENCKFCWECAHGICKNKVNKSMPLIVENSYLTSSHLEGFMRTYEGFMRTYLLRYIWSGLVYRTDLNNCVSLSLSTLLLKYKKNLLDATLTRYVKDSTYFQVKEFMQDFSISPEKFIKIAVREKRNVLIKGISEDIWENPAERIRNLKQIVCTIKYESGRQFLINIIHTIYQSYSLKPEEILKLATFYVKHNATTHFKDLCKYLWLNRRTESKKLFLECLEIADKKEFPDIKSIVSEYINYLFTAGAITKEEIMQAYALEYAMYLPNFNGMTPVMKAAIRGRSLNMLSLIKFGADPTQKDYHRGFTAWDWAVFTGNMELVKSLNHDYQNLSTCISLFTSWMFSTGGLRKSPKLLLLAVNIMSMKNFLNRIQSSCV

SEQ ID NO: 2315 - protein, 169 aa, Artificial Sequence
  Synthetic peptide
GRSLNMLSLEGFMRTYLLAVFTGNMELKNIIKELVFYMENCKFCWKSMPLIVENSYKRLFSISKVMEIMQAYALEYSLSTLLLKYSHLEGFMRTYSTYFQVKEFHNITGYTYLWAVFTGNMELAAAGGLLNFRTDLNNCVSLCTYAKSCDFRQYDLIQKYRYIWSGLVY

SEQ ID NO: 2316 - protein, 254 aa, Artificial Sequence
  Synthetic peptide
GRSLNMLSLGPGPGEGFMRTYLLGPGPGAVFTGNMELGPGPGKNIIKELVFGPGPGYMENCKFCWGPGPGKSMPLIVENSYGPGPGKRLFSISKVMGPGPGEIMQAYALEYGPGPGSLSTLLLKYGPGPGSHLEGFMRTYGPGPGSTYFQVKEFGPGPGHNITGYTYLGPGPGWAVFTGNMELGPGPGAAAGGLLNFGPGPGRTDLNNCVSLGPGPGCTYAKSCDFGPGPGRQYDLIQKYGPGPGRYIWSGLVY

SEQ ID NO: 2317 - protein, 220 aa, Artificial Sequence
  Synthetic peptide
GRSLNMLSLAAYEGFMRTYLLAAYAVFTGNMELAAYKNIIKELVFAAYYMENCKFCWAAYKSMPLIVENSYAAYKRLFSISKVMAAYEIMQAYALEYAAYSLSTLLLKYAAYSHLEGFMRTYAAYSTYFQVKEFAAYHNITGYTYLAAYWAVFTGNMELAAYAAAGGLLNFAAYRTDLNNCVSLAAYCTYAKSCDFAAYRQYDLIQKYAAYRYIWSGLVY

SEQ ID NO: 2318 - protein, 169 aa, Artificial Sequence
  Synthetic peptide
GRSLNMLSLEGFMRTYLLAVFTGNMELKNIIKELVFYMENCKFCWKSMPLIVENSYAAAGGLLNFKRLFSISKVMEIMQAYALEYSLSTLLLKYSHLEGFMRTYSTYFQVKEFHNITGYTYLRTDLNNCVSLCTYAKSCDFWAVFTGNMELRQYDLIQKYRYIWSGLVY

SEQ ID NO: 2319 - protein, 254 aa, Artificial Sequence
  Synthetic peptide
GRSLNMLSLGPGPGEGFMRTYLLGPGPGAVFTGNMELGPGPGKNIIKELVFGPGPGYMENCKFCWGPGPGKSMPLIVENSYGPGPGAAAGGLLNFGPGPGKRLFSISKVMGPGPGEIMQAYALEYGPGPGSLSTLLLKYGPGPGSHLEGFMRTYGPGPGSTYFQVKEFGPGPGHNITGYTYLGPGPGRTDLNNCVSLGPGPGCTYAKSCDFGPGPGWAVFTGNMELGPGPGRQYDLIQKYGPGPGRYIWSGLVY

SEQ ID NO: 2320 - protein, 220 aa, Artificial Sequence
  Synthetic peptide
GRSLNMLSLAAYEGFMRTYLLAAYAVFTGNMELAAYKNIIKELVFAAYYMENCKFCWAAYKSMPLIVENSYAAYAAAGGLLNFAAYKRLFSISKVMAAYEIMQAYALEYAAYSLSTLLLKYAAYSHLEGFMRTYAAYSTYFQVKEFAAYHNITGYTYLAAYRTDLNNCVSLAAYCTYAKSCDFAAYWAVFTGNMELAAYRQYDLIQKYAAYRYIWSGLVY

SEQ ID NO: 2321 - protein, 353 aa, Artificial Sequence
  Synthetic peptide
HNITGYTYLSLSTLLLKYWAVFTGNMELRTDLNNCVSLRQYDLIQKYYMVDFMREFIMQAYALEYNTFFLPSDFRKLEILTWMTLDNISFNEMEMFSLGYKIEIMQAYALEYMQAYALEYAMISLRLFEVKKNIIKELVFCTYAKSCDFAAAGGLLNFHQHYYINIKTDLLNNEFIYFARLYVYSTYFQVKEFAVFTGNMELIVSEYINYLIVDDYIRFLFKRLFSISKVMEGFMRTYLLHVVQRLGLYYMENCKFCWIIHTIYQSYRYIWSGLVYEILKLATFYKSMPLIVENSYGRSLNMLSLSHLEGFMRTYSIVSEYINYQAYALEYAMYNVDEIHHAYIVSEYINYLF

SEQ ID NO: 2322 - protein, 729 aa, Artificial Sequence
  Synthetic peptide
HNITGYTYLSLSTLLLKYWAVFTGNMELRTDLNNCVSLRQYDLIQKYYMVDFMREFIMQAYALEYNTFFLPSDFRKLEILTWMTLDNISFNEMEMFSLGYKIEIMQAYALEYMQAYALEYAMISLRLFEVKKNIIKELVFCTYAKSCDFAAAGGLLNFHQHYYINIKTDLLNNEFIYFARLYVYSTYFQVKEFAVFTGNMELIVSEYINYLIVDDYIRFLFKRLFSISKVMEGFMRTYLLHVVQRLGLYYMENCKFCWIIHTIYQSYRYIWSGLVYEILKLATFYKSMPLIVENSYGRSLNMLSLSHLEGFMRTYSIVSEYINYQAYALEYAMYNVDEIHHAYIVSEYINYLFGPGPGGRSLNMLSLISLNMLSLIKFYTLCDSPAYVLIEFLTGFFLAFSLHSDMYLRKSPKLLLKTDPWIVNRKAAIRGRSLFTAWDWAVFCNACKTLNYVVDDVPSIDYRKYIHKIILRLFEVKPKYLNYKHYKTLLANAFIPPYRGRSLNMLSLIKNYDLMKRLHIRNGNLTLFVLIEFLTGFFAAYYGVETHWPLYKTLISEMMHYTTNRRILQYKPYVPVGFEYANKAFYINHLCGMKNISEISVEELLSAVVTTAIKTLLKANKAFYIRTIPVAWDRFMLGNLSAAKYVVFHAGSLYSGRIVTTAISKFCNHMFFRYAANLLTNYASGGAFCLILAFSLHSDMYFSQAVMEMGYIISMMQTAIAVIEAIGAM

SEQ ID NO: 2323 - protein, 124 aa, African Swine Fever Virus
MLVIFLEILGLLANQVLGLPTQAGGHLRSTDNPPQEELGYWCTYMENCKFCWECAHGICKNKVNKSMPLIVENSYLTSCEVSRWYNQCTYGEGNGHYHVMDCSDPVPHNRPHQLLMKIYEKDDL

SEQ ID NO: 2324 - protein, 527 aa, African Swine Fever Virus
MFSLQDLCRKNTFFLPSDFSKHTLHLLGLYWKGHGSIQRIKNDGVLIEHDLTLSINEALILAGEEGNNEVVKLLLLWEGNLHYAIIGALRTENYNLVCEYHSQIQDWHVLLPLIQDPETFEKCHDLSLECDLSCLLQHAVKYNMLSILVKYKEDLLNVLFRQQIQGLFILACENRKLEILTWMGQNLPIPDPEPIFSIAVVTKDLEMFSLGYKIVFEYMENQGLHLTQVVRMVMLNHHFGMVINKGLLPFVLEILNYGGNVNRALSYAVTQNKRKILDHVVRQKNIPHKTIERMLHLAVKKHAPRKTLNLLLSYINYKVKNVKKLLEHVVKYNSTLVIRLLLEKKKNLLDATLTRYVKDSTYFQVKEFMQDFSISPEKFIKIAVREKRNVLIKGISEDIWENPAERIRNLKQIVCTIKYESGRQFLINIIHTIYQSYSLKPEEILKLATFYVKHNATTHFKDLCKYLWLNRRTESKKLFLECLEIADKKEFPDIKSIVSEYINYLFTAGAITKEEIMQAYALEYAMY

SEQ ID NO: 2325 - protein, 506 aa, African Swine Fever Virus
MFSLQDLCRKNLFLPLEPLGKHVVQRLGLYWEGHGSVKRVGDCFICVDQIWMLSIHKAIQIAASEGNENIVKLFLLWKGSLQYAIIGALEGRQYDLIQKYYNQIGDCHQILPLIQDPEIYERCHELNVTCTFQCLFQHAIRDNMLPIFQKYGEDLNGNRRMVQLLYEMACRLQNYDIIKWIGSNLHVYNLEAIFSIAFVRKDLTLYSLGYMLLLGRMSTEDRNFISIITRHLEYASKKGLFDFVLESLKYGGQVDTVLFQAVKYNHRKILAHFIHEIPRETVEKLILHAVESRASRKTFNLLLSSINYCVNPFVKKLLHAVVEHKYMLIIKLLLERPKKKINLVDAALFKLVKYSTYTEIVKYMGEFSVDPKRVVKMAARLMRVDLIKKISNDAWEDKLERIKHLKQMVNTMNHRNGKNLLMYNIHNITGYTYLNTKEAFNLTRFYAVHNATCLFKEMCKSCFVHDKIQLRELLEDCLHIANRHDYIQIAETADECIKYIDLITFK

SEQ ID NO: 2326 - protein, 224 aa, African Swine Fever Virus
MFPKINTIDPYISLRLFEVKPKYVGYSSIDARNQSFAIHDIKNYEKFSNAGLFYTSPTEITCYCCGMKFCNWLYEKHPLQVHAFWSRNCGFMRATLGIIGLKKMIDSYNDYYNNEVFVKHQNRVYTHKRLEDMGFSKPFMRFILANAFIPPYRKYIHKIILNERYFTFKFAAHLLSFHKVNLDNQTTYCMTCGIEPIKKDENFCNACKTLNYKHYKTLNFSVKL

SEQ ID NO: 2327 - protein, 276 aa, African Swine Fever Virus
MVLIEFLTGFFYLYGKRLFSISKVMDMICLDYYTIIPAPLAMMLAARLKNYDLMKRLHEWEISIDYALLVVDDVPSIDYCLSLGARSPTRAQKRELLRDNTFNPVYKYLMNCSGFPTKREKNIPCDVQCERLQKNIIKELVFNCSVLLEMVLHTEREYAYALHCAAKHNQLPILMYCWQQSTDAESILLKTCCSDKNINCFNYCILYGGAQNLDAAMVEAAKHDARMLINYCVMLGGRSLNEAKETAAMFGHIECAQHCFKLQSYVVDTSNTDDTD

SEQ ID NO: 2328 - protein, 226 aa, African Swine Fever Virus
MFPEREIENLFVKWIKKHIRNGNLTLFEEFFKTDPWIVNRCDKNGSSVFMWICIYGRIDFLKFLFEQESYPGEIINPHRRDKDGNSALHYLAEKKNHLILEGVLGYFGKNGTRICLPNFNGMTPVMKAAIRGRSLNMLSLIKFGADPTQKDYHRGFTAWDWAVFTGNMELVKSLNHDYQNLSTCISLFTSWMFSTGGLRKSPKLLLLAVNIMSMKNFLNRIQSSCV

SEQ ID NO: 2329 - protein, 385 aa, African Swine Fever Virus
MDEIINKYQAVEKLFKEIQQGLAAYDQYKTLISEMMHYNNHIKQEYFNFLMIISPYLIRAHSGETLRNKVNNEIKRLILVENINTKISKTLVSVNFLLQKKLSTDGVKTKNMWCTNNPMLQVKTAHNLFKQLCDTQSKTQWVQTLKYKECKYCHTDMVFNTTQFGLQCPNCGCIQELMGTIFDETHFYNHDGQKAKSGIFNPNRHYRFWIEHILGRNPEQELGTKQDPCGTKVLQQLKKIIKRDNKCIALLTVENIRKMLKEINRTDLNNCVSLILRKLTGVGPPQISESILLRGEYIFTEAIKIREKVCKKGRINRNYYPYYIYKIFDAILPPNDTTNRRILQYIHLQGNDTLANNDSEWESICMELPEIKWKPTDRTHCVHFF

SEQ ID NO: 2330 - protein, 190 aa, Artificial Sequence
  Synthetic peptide
GRSLNMLSLEGFMRTYLLAVFTGNMELGPGPGKNIIKELVFYMENCKFCWKSMPLIVENSYAAYKRLFSISKVMEIMQAYALEYSLSTLLLKYAAYSHLEGFMRTYSTYFQVKEFHNITGYTYLWAVFTGNMELGPGPGAAAGGLLNFRTDLNNCVSLGPGPGCTYAKSCDFRQYDLIQKYRYIWSGLVY

SEQ ID NO: 2331 - protein, 183 aa, Artificial Sequence
  Synthetic peptide
KKNLLDATLTRYVKDSTYFQVKEFMQDFSISPEKFIKIAVREKRNVLIKGISEDIWENPAERIRNLKQIVCTIKYESGRQFLINIIHTIYQSYSLKPEEILKLATFYVKHNATTHFKDLCKYLWLNRRTESKKLFLECLEIADKKEFPDIKSIVSEYINYLFTAGAITKEEIMQAYALEYAMY

SEQ ID NO: 2332 - protein, 124 aa, Artificial Sequence; identical to SEQ ID NO: 2323
  Synthetic peptide

SEQ ID NO: 2333 - protein, 32 aa, Artificial Sequence
  Synthetic peptide
YMENCKFCWECAHGICKNKVNKSMPLIVENSY

SEQ ID NO: 2334 - protein, 150 aa, Artificial Sequence
  Synthetic peptide
MVLIEFLTGFFYLYGKRLFSISKVMDMICLDYYTIIPAPLAMMLAARLKNYDLMKRLHEWEISIDYALLVVDDVPSIDYCLSLGARSPTRAQKRELLRDNTFNPVYKYLMNCSGFPTKREKNIPCDVQCERLQKNIIKELVFNCSVLLEM

SEQ ID NO: 2335 - protein, 107 aa, Artificial Sequence
  Synthetic peptide
NGMTPVMKAAIRGRSLNMLSLIKFGADPTQKDYHRGFTAWDWAVFTGNMELVKSLNHDYQNLSTCISLFTSWMFSTGGLRKSPKLLLLAVNIMSMKNFLNRIQSSCV

SEQ ID NO: 2336 - protein, 98 aa, Artificial Sequence
  Synthetic peptide
MSDSEVNQEAKPEVKPEVKPETHINLKVSDGSSEIFFKIKKTTPLRRLMEAFAKRQGKEMDSLRFLYDGIRIQADQTPEDLDMEDNDIIEAHREQIGG

SEQ ID NO: 2337 - protein, 396 aa, Artificial Sequence
  Synthetic peptide
MKIKTGARILALSALTTMMFSASALAKIEEGKLVIWINGDKGYNGLAEVGKKFEKDTGIKVTVEHPDKLEEKFPQVAATGDGPDIIFWAHDRFGGYAQSGLLAEITPDKAFQDKLYPFTWDAVRYNGKLIAYPIAVEALSLIYNKDLLPNPPKTWEEIPALDKELKAKGKSALMFNLQEPYFTWPLIAADGGYAFKYENGKYDIKDVGVDNAGAKAGLTFLVDLIKNKHMNADTDYSIAEAAFNKGETAMTINGPWAWSNIDTSKVNYGVTVLPTFKGQPSKPFVGVLSAGINAASPNKELAKEFLENYLLTDEGLEAVNKDKPLGAVALKSYEEELAKDPRIAATMENAQKGEIMPNIPQMSAFWYAVRTAVINAASGRQTVDEALKDAQTRITK

SEQ ID NO: 2338 - protein, 86 aa, Bacillus stearothermophilus
AFEFKLPDIGEGIHEGEIVKWFVKPGDEVNEDDVLCEVQNDKAVWVEIPSPVKGKVLEILVPEGTVATVGQTLITLDAPGYENMTF

SEQ ID NO: 2339 - DNA, 375 bp, African Swine Fever Virus
atgttggtgatcttcttggaaattcttggcctgctggccaatcaggtcttaggactacctactcaggcaggagggcatcttcgttcaacggataatcctccacaagaagaacttggatactggtgtacttacatggaaaactgcaagttttgctgggaatgtgcacatggaatttgcaagaacaaggtgaataagagcatgccattgattgttgagaacagttatttgacatcttgtgaggtttctcgctggtataaccagtgtacatatggtgaaggaaatggacattaccatgttatggattgttctgatccagtacctcacaaccgcccccaccaattgttaatgaaaatttatgaaaaggatgatctgtaa

SEQ ID NO: 2340 - DNA, 1584 bp, African Swine Fever Virus
atgttctcccttcaggacctctgtcggaagaacaccttcttccttccaagtgattttagcaagcataccctgcatttgctggggttatactggaaggggcatggatctatccaaaggataaagaatgatggtgtgcttatagagcatgatcttactctttccatcaatgaagccttaattcttgcaggagaagagggaaacaatgaagtagtaaagctcttgttactatgggaaggaaatcttcattatgccatcataggagctttgaggactgagaactataacctagtatgtgagtaccatagtcaaattcaggactggcatgttctcctccctttgattcaagatccagaaacattcgaaaaatgtcatgatttaagccttgaatgtgatctttcatgccttctccaacatgctgtaaaatataacatgctttcgattcttgttaaatataaagaggatctactaaatgtactatttaggcaacaaattcaaggactatttattttagcatgtgaaaatcggaagcttgagattcttacgtggatgggtcaaaatctgccaattcctgatcctgagcctatttttagcattgctgttgtcacaaaagatttagaaatgttttccttagggtacaagattgtttttgaatacatggaaaaccaaggacttcatttaacccaggtagttcgtatggttatgctaaatcatcactttggcatggtaataaataaaggacttttaccctttgtgctggaaattttaaattatggtgggaatgtaaatagagccttatcttatgctgtcacacaaaataaaagaaagattttagaccatgttgttcgccaaaagaatataccccataaaaccattgaaagaatgttgcatctggctgtaaaaaagcatgctcccaggaaaactctgaacttgttactatcttacataaattacaaggtgaaaaatgttaaaaagttgttagaacatgtagtgaaatacaactctactcttgtgataagactcttgttagaaaaaaagaaaaacctgctggatgctactttgacaagatatgtcaaagattctacatactttcaggtgaaagaatttatgcaagacttctccatcagcccagaaaaattcattaaaatagctgtgcgggaaaagagaaatgtgttgatcaagggtatttctgaagatatttgggaaaatcccgcggaaagaatcaggaatcttaagcagatagtgtgtaccataaaatatgaaagtggaagacaattcctgataaatatcattcacaccatttaccagagttattctttgaaacctgaagaaattcttaaattggcaacattttatgtcaaacacaatgcaaccacccattttaaagatctctgcaaatatctttggctgaacagaagaacagaaagtaagaaactgtttttagagtgcttggaaattgctgataagaaggagtttcctgatattaaaagtattgtgagtgaatacattaactatttgtttactgcaggagctattaccaaggaagaaatcatgcaagcctatgctttggagtatgccatgtattaa

SEQ ID NO: 2341 - DNA, 1521 bp, African Swine Fever Virus
atgttctccctacaggatctctgtcggaagaacctttttcttccacttgagcccttaggcaagcatgtggttcaacggctgggattatactgggaaggccatggttcagttaaacgagtgggtgattgctttatatgtgtagaccagatttggatgctatcaatccataaggctatacaaattgcagcctcggaaggaaatgagaacattgtcaagcttttcttactatggaaggggagtctacaatatgccatcataggagccttagagggcaggcaatatgatctgattcaaaaatattacaaccaaattggggactgccatcagattctaccactgattcaagatccagaaatttacgaaagatgtcatgaattaaatgttacatgtacctttcaatgcttatttcaacatgctataagagataacatgctgcccattttccaaaaatatggagaagatctgaatggaaacaggagaatggttcaacttctgtatgagatggcatgccgattacaaaattatgatatcatcaaatggataggatctaacctgcatgtttataacttggaagccatttttagcattgcttttgttagaaaggatttaactttgtattctttaggctacatgcttcttctgggtagaatgagtactgaagatagaaactttatctcaatcataacacgccatcttgaatacgcatcaaaaaagggactttttgactttgtactagaatctttgaaatatggaggtcaagtggatacagtgttgtttcaggctgtaaaatacaaccataggaaaattttggcccattttattcatgaaattccccgtgaaacggttgaaaagctgatactccatgctgtggagtcacgggcctccagaaaaacattcaacctgcttttatcttccataaactactgtgtgaacccttttgtcaaaaaactactgcacgctgtggtggaacacaagtacatgcttatcataaagcttttgctcgagcggcccaaaaagaagataaacctggtagatgctgctctattcaaacttgtaaaatactctacttatacagaaatagtaaaatacatgggtgagttttctgtggacccaaaaagggtggtcaaaatggcagcacgactcatgagagtggacctgattaaaaagatttctaatgatgcatgggaagataaactagagagaatcaagcaccttaaacagatggtaaataccatgaaccacagaaatggaaaaaatctattgatgtacaatattcacaatattactggatatacctatctgaacaccaaagaagcatttaacttaacaagattttatgctgtccacaatgcaacatgtttgtttaaagaaatgtgtaaaagctgttttgtacatgataaaatacagctcagagaattgcttgaagattgtttacatattgctaataggcatgattatatccagattgcagaaaccgcagatgaatgtatcaaatatatagatcttattacatttaagtaa

SEQ ID NO: 2342 - DNA, 675 bp, African Swine Fever Virus
atgtttcctaaaataaatacgatagatccatacatctctttgcgattatttgaagtaaaacctaaatatgtaggctatagctccatagatgcacgaaatcaaagcttcgcaatccatgacataaaaaattatgaaaaattttcgaatgccggattattctatacatcccccactgaaataacatgctactgttgcggaatgaaattttgtaattggttatatgaaaagcaccctttacaggtgcatgctttttggagcagaaactgtggctttatgcgtgcaaccttgggcattataggacttaaaaaaatgattgatagctataacgactattataacaatgaagtttttgtaaaacaccaaaatagggtttatacccacaaaagattagaagatatgggtttttccaagccttttatgcgatttattttggcaaatgctttcattcctccttatcgaaaatacattcataagatcattttaaatgaaagatattttacttttaaatttgcggctcacttactttcctttcataaagttaatcttgataatcaaacaacatattgtatgacatgtggtattgaaccaattaaaaaagatgaaaatttctgcaatgcatgcaaaacacttaattataaacactataaaacactgaattttagtgtcaaactttga

SEQ ID NO: 2343 - DNA, 831 bp, African Swine Fever Virus
atggtgttaatagagtttttaacaggtttcttctatttatatggaaagagactgttttccattagtaaagtcatggacatgatatgtctagactattataccattattcctgctcctctggcgatgatgttagcggcaagactaaaaaactatgacctcatgaaacgactgcacgaatgggaaatctctattgactacgctctacttgtagtagatgatgtgccgtctattgactattgcttaagtcttggcgctagatccccgactagagcacaaaaaagagaactgctgagggacaacacgtttaatcccgtgtataagtatcttatgaactgttccggcttcccaacaaagagagaaaaaaacattccttgtgatgttcaatgcgaaagactgcaaaaaaacattataaaagaactggtatttaactgctctgtactgcttgaaatggtactgcacacagaaagagaatatgcatacgccctacactgtgctgcaaaacataaccaattgcccatcctcatgtattgttggcaacaatccacagacgcggaatctattttgttgaaaacctgctgttctgataagaacatcaattgttttaactattgtattctatatggcggcgcccaaaatttggatgctgcaatggtggaagcggcaaagcacgatgcccggatgctgataaactactgtgtcatgcttggtggaagatccttaaacgaagcaaaagaaacggctgccatgtttggacacattgaatgcgcacaacactgttttaaactgcagtcttacgtcgtggacacatcgaatacagacgacactgattaa

SEQ ID NO: 2344 - DNA, 681 bp, African Swine Fever Virus
atgtttccagaaagggagatagaaaacttgtttgttaaatggattaaaaaacatattagaaatgggaatcttacactatttgaggaattttttaaaacagatccgtggattgtcaatagatgcgataaaaatggatcctcggtattcatgtggatatgcatctacggacgtatagactttttaaaatttctttttgaacaagaatcttatcctggagaaataattaaccctcataggagggataaagatggaaactctgctttacattatttagctgagaaaaaaaatcatttaatcctggaaggggtgttgggctatttcggaaaaaatgggaccagaatttgtttaccgaattttaatgggatgactcctgtgatgaaggccgcaatacggggccgttctttaaatatgctttctctcataaaatttggagcagatccgactcaaaaagactatcatagaggttttactgcttgggactgggcagtctttacaggaaacatggagttagtcaaatctcttaaccatgactaccaaaacctctctacatgcatttccctctttacaagctggatgttttccaccggtggtttaagaaaaagcccaaaattattattactggctgtaaacataatgtctatgaaaaacttcctgaacagaatccaaagttcctgtgtgtaa

SEQ ID NO: 2345 - DNA, 1158 bp, African Swine Fever Virus
atggacgaaatcatcaataaataccaagctgttgaaaaactttttaaggaaattcagcaaggattggccgcgtatgatcaatacaagaccttaattagtgaaatgatgcactataataatcatatcaagcaggagtattttaactttttaatgattatttcaccttatcttattagggcgcatagcggagaaacgctgcgaaacaaagtaaataatgaaattaaacgtcttattttggttgaaaatatcaataccaaaatatctaaaacgctggtaagtgttaattttttactacagaaaaaactttcaacggacggggtgaaaacgaaaaacatgtggtgcaccaataatcccatgctgcaggtaaaaacagcccacaacctttttaagcaactatgcgacacacagtccaaaactcaatgggtacaaactttaaaatataaggaatgcaagtattgtcataccgacatggtgtttaacaccacgcagtttgggctgcaatgtcctaactgcggttgtattcaagaattgatgggaaccatttttgatgaaacacatttttacaaccatgatgggcagaaagcaaagtcaggtatctttaaccctaaccgtcactatcggttttggatagaacatattcttggtagaaatccagaacaagagttggggaccaaacaagatccctgcggaaccaaggtgttgcaacaactaaaaaaaattattaagcgcgataataaatgcatcgcgcttttgacggtcgaaaatattcgaaaaatgttaaaagagataaaccgcacagacttaaataattgtgtttctcttatattgcgtaaacttaccggagtagggccgcctcaaatatcagagtcgattttactacgaggcgaatacatatttacagaggcaattaagatacgggaaaaagtgtgtaaaaaagggcgtattaataggaattattatccgtattatatatataaaatttttgacgccattttgcctccaaatgataccacgaatcgacgcattttacaatatattcatttgcaaggaaatgatacgctagctaataatgatagtgagtgggaatctatctgtatggagctccctgaaataaaatggaagcccacagatcgaacccattgtgttcattttttttaa
